United States Patent Application Publication US 2026/0357256 A1 - sequence listing, part 20

SEQ ID NO: 9 - DNA, 58617616 bp, Homo sapiens (residues 41,249,438-43,420,460 of 58,617,616)
  source 1..58617616: mol_type = genomic DNA
gagtgagactttgtcttaaaaaaataaaacacacatggctgggcgtggtggctcacgtctgtaatcccagcactttgggaggccaaggcgggtggatcacatgaggtcaggagttcgagactggcctgatctgcatagcgaaaccccacctctactaaaaatacaaaaattagccaggcgtggtggcaggcacctgtaatcccagctactcgggaggctgaggcaggagaatcgcttgaacctcacaggcggagattgcagtgagccgagatcgtgccactgccctccagcctgggcgacagagcaagactccgtctgaaaaaaaaaaaaaattaaaacacacacacgcacacatgggcgacacaaccaccaccaagggaataccagaagcagagagagggtgaaataccctggcttctccctttctccccgctacctgccagtctcccataagggcctacctcccattggcaaatcccaagaggaaaccactaggaaagggagcctgggaaatgtagttttcaggggccggcccactgtgatacatagtggagcaggagaagctctagaatgaggcatacctggctgaatcatttaccagctatgcgatctcaggcaaatgactttccctctctgagcctcccacctgtcatctggaaaaaaggaccctaatgtccccaccttccaaagctgttttgaggcaaagcacttcatgctgagggtggcaagtaggacatgcttgttaatgtggagtaggactatattatttccattatcagagagggcaggagccatttcagggttacacagcacaggaagtccagggctaagttcttcacacacagggaaggagaagcatagggcattcagattggggctggtggtgaatagagaatgatcctttctgaattacagggcttaaaagcttgggctatgaagtcattacccactcattcgttcattatggagcacctcctgtgtaccaggttattttgtttgttttgctctgttttgttttgttttgaggaggagtctcactctgctgtccaggctggagtgcagtggcatgacctcagctaactactacctctgcctcccaggttcaagcgattcttctgcctcagcctcctgagtaactgggactacaggtgtgcgccaccacgcccagctaatttttgtgtttttagtagagacggggtttcaccatgttggccaggatggtctctatctcttgacctcatgatccacctgcctcggcatcccaaagtgctgggattacaggtgtgagccaccacacccagcctacgttttttgttttttgagacagagtcttgctcgttgcccatgctggagagcagtggcaggatcacagctcactgtagtctcaacctctgaggctcaagcgatcctccccactcagcctcccactggttatagtcttggcctgggtctgaatctcagccgtgcaaccttgggcaagtcattttgcctctgtgagccacagtgtcctgaactgttaaatgggatgatacttgtttgggtccccagggcaggtagggaagtgctgggaagcagcctgggcagttgtgagcaggtggaccctggagccagactgcccgggtttgagatctgcctcttccacctccaagctgtgtgttcccttaggcagactcctaacctttttgtgccttgctttcttcatctttaaaatagagataggccagggacagtggctcatgcctgtaatcccagtgctttgggaggccgaggtgggaggatcacttgaggctgggagtttgagaccagcctggacaacatagcaagactccctctcaaaaaattggctgggcatggtggctcacacttgaaatcctagcactttgggaggccaaggcaggcagatcacttgaggtggggagtttgagaccagcctggccaacatggtgaaaccccgtttctactaaaaatacaaaaattagctgggcatggtggtgcatgcctgtaatcccagctactcgggaggctgaggtacgagaatctcttgaactggggaggcagaggttgcagtgagccaagattgcgccattgcactcaagcctgggggacaagggcgaaactccatctcaaaaaaaaaaaaaaaattatccgggatggtggtgcgtgcctgtggtcccagctactcaggaaggcaagcctaggagttcgagcctaacctccagtgagctatgtttgctgtgattgcatccatcctgggtgacagcgcaagaccctgtctcaaaaaataaaaataaaaaacaaaaacaaaaacaaaacaaaacaaaacaaaaaaccaataaaatgggaatgataatagtagcacctgagaagattaaatgagttaatatatataaagttggccaagcgcagtggctgacgcctgtaatcctagcactttgggaggccgaggcgggcagatcgtgaggtcaggagatcgaaaccatcctggctaacaaggtgaaaccccgtctctactaaaaatacaaaaaattagccgggtgtggtggcacacgcctgtagtcccagctactcaggaggctgaggcaggagaattgcttgaacccgagaggcggaggttgcagtgacccgagatcaaaccactgcactccagcctggacaacagagtgagactccatctaaaaaaaaaaaaaaaaagaaaatatatattttatatatatatatatattatatacacacacacagacacacacacatacacatatcacatataaagtgctgagtatggtgcctggtacttactaatcatgtttgatgaagatgagtgatgatgatgatgatgatgatgatggagtggaggtggagggagagtcctccctctcctcccctcctcctcacgacctttctctctccctcaagttgccatctgcacgaggtcagagctggaggatttcctgagtgaagcggtctgcatgaaggaatttgaccatcccaacgtcatgaggctcatcggtgagagaggggcagattcaaggggtctacaagccccatgggggccatagcagagggaagagccctgcttctggccctgggaagatcaaacttccaggcttcctgctccccgctccttcagggtcagcaggcttccccctcctagtctccctcagcttggaatgtgacctctgatcattcccagaaatagctgaggtccccaggagggctccggaaacgtccctgggaactctgctggaaacagcttctctgcagcttggtccttgccactgccactacccccaaacaatatggtggccagattggatgggtagtgagaaggagaggctggaggctggctggtggggggcttggcttccccttctgcccagcaggagtgacagggctacctggggggctcaggtgtctgtttccagggttctgaacgagagagcttcccagcacctgtggtcatcttacctttcatgaaacatggagacctacacagcttcctcctctattcccggctcggggaccagccagtggtaaggggcgtttaatcattcagtctacaaatattaactgagcatctatcaggtacccagtgctgctcagaccctgggaagaccacggtgaccaggagcttgctctcctggagcatttcttccagcaggggaggggcggatgataaacaagctaataaatacctaagcgagatgatttaaatgtttaagtgctaggaaggaaatacagtaggatggaagataaggaggccaggcagtgaatttgggtggacgtggaagatcttgccgaggaggtgaccgtgaaggagttggggctggggagatgtctggagatctgggcaggaagcgaccccaacagagcgcacagcataggcaaaggctcggaggtgggaatgatcatcgtttgtctgaagaccagacaggagtctggtgggagtgtcagtcaagggcaagaacataggcaatcaagtccaagaggaaggctggagcaagtttataggaccttgcaggccatggagaggggttgggttgaattgtcagggccatgggaaaccactgcgggcagagctaggcttgcacagagggatggagggaggagggatcgcatcaaggactctgttgacctctcctcccacctgccttggctccccagtacctgcccactcagatgctagtgaagttcatggcagacatcgccagtggcatggagtatctgagtaccaagagattcatacaccgggacctggcggccaggaactgcatgtgagtgcctttcagggaccccccccccccaactgctcctgcactccctgagggagttccctccctccttcttaggatggaagcagggctagacacccgctgagggcaggtcagaactcaggaccaggaaagtcagtaagggggtctgggaaggcttcctggaggaggtgagtcctgaactgagatctggaaggagcatttggatgcggagagggaagagaccagaaggtgggctcagtgcacagcatgaggtgagcaaaggggctgaggtgaccgatgggggtggggacacgtgagctgcatctctgtcccactccatgctgggtgtcttgcctggggctgccctttggaagcggccacactggataagaaaatcaaactccccaccaatggacaagcagaaaatatgccagatggggtgcagtggctcacgcctgtaatcccagcactttgggagtccgaggcgggtggatcacttgaggccaggagttcgagaccagccttggtgaaaccccctgtctactaaaagtacaaaattcagcctggtgcggtggtgtgcgcctgtaatcccaacacgagaattgcttgaacccaggaggcggaggttgcaatgagccgagatcgcatcactgcactccagcctgggcgacagagcaagactctgtctcaaaaaaaaaaaaaaaaagaaagaaagaaagaaagaaagaaaaaagaaaatagtaacctgtagtcccagccattcccaaggcttaggtgagaggattgcttgagcctcgagaccagcctgggtaacaacaacgagacaccatctcaaaaaaaaagaaaaaaagaaaagaaagaacaaaaaatcccccaaaagccagaatagagggtaaggggagggtagaaggtggagggaatggaaccacagagttagaatattagtcttggccaggcgcagtggctcacatctataatcccagccctttgggaggctgaggcaggaggatcacttgtacccaggagttcaagaccagcctgggcaacatagtgaatcctgtctttacaaaaaataaattagctgggcatggtggtgtatacctgtggttccagctacttgggaggctgaggtggaaggattgctagagcccaggaggttgaggctgaagtcagccatgatggtatcacttcactactgcctgggcaacagggcaagatcccatctaaaaaaaaattgatgtatattttacatacactaaaatatacacatgcagctcagctcgatgaatttttatgggtatagacccatgtaaccactagatgaaggtaaagaatatttcttagccccagcaggctccttcatgcctcttcgtcttcccaatcactaccgccaagtggtacccactatcctgacttctcagtgctagtttagcctgttctgaaaagtcatacaaatgggatcatgcagtttgtactgctttgtgtctggcttctatggctcagcatgatgtttttgagatggatctgtgtaggggtagtttgctctttttctttgctgtgtggtatggtattccatcatatgaatgtcctgtggattttcttttctttttttctctttctttctttttctttcttttctttctttttctctctgtcctttcttctttcttttctttctctttctctctctttatctccttccttccttccttccctccctccctctctctttccctttctttccctttttttctttcttttcttttttgttttgacagagtcttactctgtcctttagggtggggtgcagtggcatgatcatagctcactgtagcctccaactcctggctcaagctatccttctgcctcagcctcctaagtagctggaactacagacatgtgccaccatgtccagctaatttttaaatttttttgtagagacagggtcttgctttgttttccaggctggtcttgaactcctagcctcaagtgatcctcccaccttggcctcccaaggtgctgaaattacaggcttgagccactgtgcctgtttttttttttgtttgtttttgagacggagtctcactcactctgttgcccaggctggagtgcagtggcgtgatctcagctcactgcaacctccgcctactgggttcaactgattctcttgcttcagcctcccaggtagctgggatttcagatgtgcaccaacacacctggctaatttttgtacttttagtagagacagagtttcaccacattggccaggctggtctcaaactcctgacctcaagtgatccacctgccttggcctcccagagtgctgggattacaggcgccagccaccatgcccagccatgttctgtttcttaatctgggtgctggttacatgggtgtgtgtgtgtgtgtgtgtgaaaattcagtgagctgcttacttatgacttgtgcacatttccatatgtacagtatacttcaagaaaaaaaaatttcatcaaggaatcaaacccaaggaaggaccttagaatctagcaaagagccaaaattgggaagtcctgaggaagccctttgtcccatcctcacttgacagagtgaacaagaagtaaagcagttcccttctggactgggatgaaggtttaggagacagatccccacccgcagccaggacagtgaggggaggaggtgcagatgtgtctgagagccagggcaggcttcctggtggaggtgactgatgccctgaccctgttcctttccccaatccaaacaggctgaatgagaacatgtccgtgtgtgtggcggacttcgggctctccaagaagatctacaatggggactactaccgccagggacgtatcgccaagatgccagtcaagtggattgccattgagagtctagctgaccgtgtctacaccagcaagagcgatgtggtaggtgcactcccgccaagagtggggaaccatgggagggcatggcctgaccatcacacactatgcctgggtggctgtggatgcaagggtcacagggacatgtgggcttccctttgcaggggcttgtccacatgggctgggcatgtcttggggtatggtgggcatctctgaatagtggtgtgtacatgcccaggataaatacaggcccacgtgtgcatggtagcaatgtagacagtttaggttagaagaagctgcagtgattatgcgtgcatgtgcgcacactcatagaatgtggacagccagggtgtgcagagtggcacatgagctcatgtgtccatgaagtgtgtatatgtgtgtgatggtgagcatgtgtatgcatccacaaaagttacttattcatgtgtatacccgtgtcaagtattttttatatatatatatttttctttttttgagatggagtctcgcactgtcacccaggctgcagtgcaatggcatgatctcagctcactgcagactctgcctcccgggttcaagcaattctcctgcctcagtctcccgagtagctgggattacaggcgcccaccaccatgcctagctaatttttgtatttttagtagagacggggtttcactatattggccaggctggtctcaaactcctgacctcaggcagtccgcccacctcagcctcccaaagtgctgggattacaggcatcagccaccgcacccggctaaagtattatgtttctatgaatacttgtgatgctcccagaggatggttgtgaacatgtgtacataagtgtgggtgtacccatgaacctgggtattggtgcgggtgattctgtgcaggagagactgtctaattccctctgcccctcacagtggtccttcggggtgacaatgtgggagattgccacaagaggccaaaccccatatccgggcgtggagaacagcgagatttatgactatctgcgccagggaaatcgcctgaagcagcctgcggactgtctggatggactgtgaggacccttaggtctcccccaacccagaattcattccaaacccctgactacccccagatggccctcacaggtccaggactctctataacccagacagaatccctgagaatgctgagtgacccacttgcccctcaccaatgctctgagtagggccatcactaaccagtggggtgcaaatcagctaaaggcaccctttcctcctttgtctgtgtgggctgaatcagccccctggctccccacccccaagccaggtatccttgggtagtgaataacagcacagtcttacctggcggccctgcctttgggacatgcactcccagagacttctcattccagactcctgagcacaccatgcttccccgacatgctcctcaacacctgagactctctgcaaaacccttcagtttgttttattggccttctccagactcaggtctcctctgagatatttgcaggatccttcagggaatgcttaccaaactttgcaatattggagtatgcggagaaggccgtgacatttagctagcactttgagggtaaagagaggatgactttgggtcaggaggagacagcctggggcgtcagactcctcagtccaccttgggtactccaagagctgagacgagtaaaaataacagctaacattttcatataactgactagaaggcactgttttaggtgcctggcatgtgtcaaatcatttggtccttaccacagccatgtgatgtagataggtatcattatgattcccattctgcagataagaaaacccagtcctacagggagggtaatttatttttatttattgacttgagtctcgctctgtcgcccaggctggagcacaatggctccatctcggctcactgcaacctcccaggttctagcgattctcttgcctcagcctcccaagtagctgggactacaggcgtgtgccaccatgcccagctaattttttttgtatttttagtagagatggggtttcaccaccttagccaggatggtcttgatatcgtgacctcatgatccacccgtcccagcctcccaaagtgctgggattataggcatgagcctccacgcccagtctgggagggtgatttatttgccaaagattgcacagctggtgtgtttgttatctatatccccaaatcaagtagtttaaaacaacaaacgtttattatctcacacaatttctgaaagttggatactgggaacagcttagcagggtgattttggttcaggatctctaatgaagttacaaagatatcactgggggctgcagtcatctgaaggttgggactggaggattgctttcaaggtggcttactcacatggctgtagcaggaggcttcagttcgttgccatgtggacccctttgtggcactgcttgagcttactcacaacatggcaacccaggagaaagtgcgaggaagccacatgccttttatgacctagtctcagaagtcacacacaccatcacttctgccaaatcagaagcaagtcactaagtcctgcccatgctcaagaggagaggatttattctccgtcttttgcagggaggagggtcaaagaatttatggacctattttaaaccagcacagcttgtaagtggcatagccaggctttgatgcaagtctgttctggggagctggaaggtctgttctagcaaaccctcatcagaatactactccatatacagacaggtttcccgagacccttcccagctcctgagtctcccaggacccaactcagaaattcttgggaattcccaaatccccatagatggcctcaaactgctgaggctccctataaccctctaaaatgcccccagtcccctgagtgtcctaaaatgtccccaggcttccagaatgcaccccttctgagtccctgctcaatctcccacccctcattttgctgccctaggtatgccttgatgtcgcggtgctgggagctaaatccccaggaccggccaagttttacagagctgcgggaagatttggagaacacactgaaggccttgcctcctgcccaggagcctgacgaaatcctctatgtcaacatggatgagggtggaggttatcctgaaccccctggagctgcaggaggagctgaccccccaacccagccagaccctaaggattcctgtagctgcctcactgcggctgaggtccatcctgctggacgctatgtcctctgcccttccacaacccctagccccgctcagcctgctgataggggctccccagcagccccagggcaggaggatggtgcctgagacaaccctccacctggtactccctctcaggatccaagctaagcactgccactggggaaaactccaccttcccactttcccaccccacgccttatccccacttgcagccctgtcttcctacctatcccacctccatcccagacaggtccctccccttctctgtgcagtagcatcaccttgaaagcagtagcatcaccatctgtaaaaggaaggggttggattgcaatatctgaagccctcccaggtgttaacattccaagactctagagtccaaggtttaaagagtctagattcaaaggttctaggtttcaaagatgctgtgagtctttggttctaaggacctgaaattccaaagtctctaattctattaaagtgctaaggttctaaggcctactttttttttttttttttttttttttttttttgcgatagagtctcactgtgtcacccaggctggagtgcagtggtgcaatctcgcctcactgcaaccttcacctaccgagttcaagtgattttcctgccttggcctcccaagtagctgggattacaggtgtgtgccaccacacccggctaatttttatatttttagtagagacagggtttcaccatgttggccaggctggtctaaaactcctgacctcaagtgatctgcccacctcagcctcccaaagtgctgagattacaggcatgagccactgcactcaaccttaagacctactgttctaaagctctgacattatgtggttttagattttctggttctaacatttttgataaagcctcaaggttttaggttctaaagttctaagattctgattttaggagctaaggctctatgagtctagatgtttattcttctagagttcagagtccttaaaatgtaagattatagattctaaagattctatagttctagacatggaggttctaaggcctaggattctaaaatgtgatgttctaaggctctgagagtctagattctctggctgtaaggctctagatcataaggcttcaaaatgttatcttctcaagttctaagattctaatgatgatcaattatagtttctgaggctttatgataatagattctcttgtataagatcctagatcctaagggtcgaaagctctagaatctgcaattcaaaagttccaagagtctaaagatggagtttctaaggtccggtgttctaagatgtgatattctaagacttactctaagatcttagattctctgtgtctaagattctagatcagatgctccaagattctagatgattaaataagattctaacggtctgttctgtttcaaggcactctagattccattggtccaagattccggatcctaagcatctaagttataagactctcacactcagttgtgactaactagacaccaaagttctaataatttctaatgttggacacctttaggttctttgctgcattctgcctctctaggaccatggttaagagtccaagaatccacatttctaaaatcttatagttctaggcactgtagttctaagactcaaatgttctaagtttctaagattctaaaggtccacaggtctagactattaggtgcaatttcaaggttctaaccctatactgtagtattctttggggtgcccctctccttcttagctatcattgcttcctcctccccaactgtgggggtgtgcccccttcaagcctgtgcaatgcattagggatgcctcctttcccgcaggggatggacgatctcccacctttcgggccatgttgcccccgtgagccaatccctcaccttctgagtacagagtgtggactctggtgcctccagaggggctcaggtcacataaaactttgtatatcaacgagcttctgtctcctcttgtctccttttagctgtgatgtggccccattccctggcaattcagttcccccatcagaaaaaagaagggcttggtagggtcttggaattctgtcctcactagagagggtagaaatgaacacacagatagacaaaaagacatacaagcaaagagatgcaggttctcagaaacccccagtgaggaactggcatacagatccaggatcacagacacacacacacacacacacacctgttccgccgcaaactaacagacacatgaattaatggacacacccaggaggacctggtcacaaatacagagactgaaactcagacgcatagagtaacacagacacacagaattacacagacacaagcatatttacaaacatgctcaggcagatacccgccacgaataggaagagacacagacctagagtcaagtgacacaaatactcaagagacatgtagagtacaacaggtactcacaaccccgaacgttcagactgacatagaaacacaggcacagaacacctccgatcatcacggacccacaaagggcctccagcgaagaccagcccaccgtgtctggcacgcactcgcgagcgggcgttcgcgggtgtggccggcagcaaatggagaaacccttggcagcgcccggacgccctccagtggcggctcctgagaaccggggacagttcaatccgggccacaaacttttttagaacaaatcattgtgggaagctgggaggagagagagagagaggaagtcggacgtgggcgaggggcggggtgtctggactggaacctctgggcccacgtgagtgtctgtcccgctgctgagtgggtgctgtgtgtttgggttgctgtagtgttcgcttgtagtgcaactatcctgtgttatctttattattcgatgccgcctgcctctgcggaccgtagtgggcacatctacactgcagcggggtgccttacccaaagcagatcggaattggggccgggcgcggtggctcacgcctgtaatcccagcactttgggaggccgaggcgggcggatcacttgaggtcaggagttcgagaccagcctggccaacatggtgaaaccccgtctctactaaaaatacaaaaattagtcgggcatggtggcggggacctgtaatcccagctactcggaaggctgaggcaggagaatcgcttgaacacgggaggcggaggttgcggtgagctgagatagaggccctgcactccagccagggtaacaagagcgagactccgtctcaaaaaaaaaaaaaaaaaaaaaagaacaacaaaaaaaagaactggatgcgtctgatctgacgcacgcctgtttgtttacgactgcggggtgtgcctttgtctgagtagagatagtgtgtggcttttgcgggcttaacgtgtggctcaggaggcagtgggagtctgcatcatgtatcccgattgcgtcttactcgagttttgttttgagttagaggcgacaggtggtgcagcgttagacactgggaagctctgtggcttttgtattcctgagcgcgaaggttaatgacggatccgtggggttgagcttgtcggtacagacgccagacagcccgatttacgggaacagccgattagaggattcgggagagcggtcggtgaacttctggatgtctttcgggaggggaaggctctatggtcgcgtgcagagcgcccgttccacgtcaggtacccgaccatagagcaaggcggccgcggactacccaagggaaggggaggccgtgtcctttacaacttgcctcccgttgttagtctagtttctatagccaaaccttcgggactctctcaactcaaaattttgcttttcctaaaggcaactgggttccttccagattacgaactgtgtatccacttaatctctatttcgtatacctcctcctacagcgaaatttgtgaggcagtcctctgaagcacggccaatctggtgaacttttcctaaaatgagccatcgctaccagctttagtgagctaagacaataactgcgattggtgggcagattgttttgaaaccgccctaacggcaaggggcgggctcctggtgaattcatctctttccggtttcttaaaggcaacaggaaggaggggtttctgccgaccctccatttgattggttctagtggttttacccgctcggactcctcaaggggcgggagatgtacaccaatcggaatgtgtgttacagagacacttagtttgatgaaaggactgcgcaggaaaggccgtgggacactcattctgagatcttaccgttgattggaccaaattgttactcccttattttcattggaccttacggcagccggcgcgcgagagttacccaatcagcaagcgctccgcctcctgccttttcccgccctccgctccggcctcggcttcgacgtaggccaacgcttcctccccagtagctcctaggccttctcgtggccgttgttttgaaaacggcgctctgattggctaggtttccgggcccgcgcccgttgccccacgcactgaccaattggcactcatgtaacatcggacgaggcacgagtgaggggggaggcggtggcggcggccattttgagccgctgccgccattggagtgggccccccccctttcccccttcgcctcctgacaggaaaggtttaagggggacagagccctgggaggccgggccgggctcgggggccaccccgggggcccgggccatggatgtgcgccgtctgaaggtgaacgaacttcgcgaggagctgcagcgccgcggcctggacactcgaggcctcaaggccgagcttgctgagcggctgcaggcggcgttggaggccgaggagcctgacgacgagcgggagctcgacgccgacgacgaaccggggcgacccgggcacatcaacgaggaggtcgagaccgaggggggctccgagctggaggggaccgcgcagccaccgccgcccgggctgcagccgcacgcggagcccggcggctactcggggccggacggacattgtgagagtgcgcggggcgggggccggggagcccggagcctgggccgaggaaagggctgtgggacgcgggagtccagcgcctgaggtcggggagacgacctgaggatcgggggatcccgctacccgccgccgaaaaggatctggggaccagggccccagcacgaccggagggtggatcctgacactcagtgcaggggggacactgggggaggggcctctgggtttcggaggtgagggacgggggtggcggggaggattccgtaccgtagggatcggagaccggaaactgctttctggagccgaagagagtcggaagaacaagaggttttccgtttgggttggggagggtctcgaaaatggggatcctagggtacggagctccgtgggcttggcggtcgtgctagcccagcgtgtgggctggggggtggggagccgtgtttccagggtggggaaggaatgtccaggtgtgcggggctgcgagagttctgaggaaggaggatcctggaatatgccgctggatgcgatcctgggcgttctcctatttgggtacgggggtgggtgggagaggtggaggcgctggtgtctgtggctggggagggtcctaatggactcagtgctttggagtttggctagtgagcatttaggggctgcgggagattgaactagggggcacccccatctctcttccggggctggaaggccacccttgaagcaggcacagcctggacattaggtgctgggagatctggggactttctggttggcttctagaagaggtatagggagccctggtgtccagaggctggcgggggagaggatgctttcctggacaaaggatctgggggtctagagctaagaaaactgagggcaaataactcttgaggctgctgctgactggtctggagctaactgtggggtttttggagaacagagggtagctgggggtgggatgggggcagatgagttggtaacattccaagtggatgaaatatgtggcgggagacagaggatcctgtgtccagcacaggagtacgtatctggcttagcgaatatggggaggggggaggccgtagggagcaaagagaaagaaacctgttgacttcactggaggcctcagagtggagtgtggggaatgtttctggacctgagcgtctccaggagaaatctcgacggttcccagaagcagttatttgtgtacccagggagtgggggccctcggggagcagcacggaactcttcatcagccaggagctgtgactctgggaatgggttcgggtagacctgcggttgtctgaggagaggaaaacctgatatgggacggcgtgaatcttcagttagaaaaaaagcagctttcgggccgagtgcagtggctcacgcctgttattccagcactttgggaggccgaggcgggcggatcacgaggtcaggagttcaagaccagtctggccagcatagtgaaaccctgtctctactaaaaatacaaatattaaccggatctggtggtgtgcgcctgtagtcccagctactcgggaggctgaggcaggagaatcgcttgaacttgggagggggaggttgcagtcagccgagattacgccattgcactccagcctgggcaacaaaagtgaaactccgtctcaaaaaagaaaaaagcagctttctttctcttttttttaaatacagatggggggtctcgctatgttgcccagggtggtcttgaactcctgggttcaggtgatctcacctcggcctcctgaagtgctgggattacaggcgtgaatcactgcaccaggcctcagggcagctttctagtaggactgggaaatggggggactggaaaggttaaggagtaagtagaagggattctggcgtaagagtttgtggagtttttctgaaaagagggcaccctgggacttggggctaaggggataaggagagaaatgaggtaacagaagagacaggatttggggttggaattggatacttgttcataagagaatttcccggagggaggagtgtggatttggggtaggcagtggcctagagattatcgaggacccaggtgctggaaagaggacttcccattgcagagacttgtgaagaaaggagtgggcctgtgtgtgtgtctagagcaggagggatcgtggcaggaatgcctagcaagaaagggtagtgggttagtagtgacctggtggtctgggcagagagtcatctctgagaggaaagcgaattaggtgctttggagcgtagactctagactaagacagacttcgtttcaaatctggcttaaagatattggcaagtcacttcacctctgtgggcctggtttccttaatgtgtaaaatggggttaatcaacaaatagtgtgttcacagcccctccaacccctgaggggtgttatgaatgagatcacatgtgaagggcttatcactgggcctgccttttatgagaagagggatgttttagagaatggagaaggaccctagaattatagcttctccaggaggggctgcctctgtgaacacaggagagagatgctggggaaaagaggctttgtgggaagaggagcattgtgcttggagcctggaagcagcagaatagtttgaaagggccccatattccaattaaggagataatgctatttcttcctctctcccttacttgctacaacaaagtcctttgagcccccttcatgcctcccttaagccctccttcaaccttggtaaacagaccggtagcaaaccacatgacctgtgactttcctccctttgggctgcacctggtttgtgcccagatgtatttatcctctgagaaggaatccgatcagttagcaagtggcagaatagtctctccttccctttggttctggctcacggctcctggcatagccactggtagggcccttggggccctaactgagagctagcccctggggaggagagcctgtatgctgcccatcctagctttctaaagttctctctgggtttggctgcaaggttcttgagggaatttctggttttagttccacctctgagctttcacacgtgttatcccaaccccagtaacattctccattctcatcactgagtcattacctgtgtatcctttgaatcaaggcttatctgttattttccaggtccctttcttcattcctggtactactttgtagccttcaacacaatcatattaaatttttgtgtgtctttaagatttgtctgtctcactaaactgaaggcttcagtggggcaagcttgtcttcagctgtatcccaggctctggagtatagtatgcatgccatgaatagttaatattattattcttaccactcttagttgagctcctggacctgcagatgccttctggatgctttggtccagggttcttcatgaaccgcccctctaattggccatttttaattttgttttaagatgccatggacaatattaccaggcagaaccaattctacgatacccaagtcatcaaacaagaaaacgagtcaggctacgagaggagaccactggaaatggagcagcagcaggcctatcgtccaggtaggaaaatacacatggttcatctctttggatggaaacaatctacatggagcctttaccccctgcttagagcgggtcttcccagagaaactgtgcatcttttttcttgggcagttcatctaaacattgtcactctggcaagaattgtttaaaggaaagatctcagtcctatttccaagtgttgggagaggggaggttccatggtatctgtaaaaaagtgatgttagtatcagccgggtgtggtggctccctcctgtaatcccagcactttgggaggccgaggcaggtggatcacctgaggtctggagttcgagaccagcctggccaatatggtgaaacccgtctctactaaaaatacaaaaattagccaggcatggtggcaggcacctgtaatcccagctacttgggaggctgaggcaggagaatcacttgaacccaggaggcggaggttgcagtgagccgagatcgcgtcattgcacttcactcagtctgggcaacaagagtgaaactgcatctcaaaaaaaaaaagatgttagtataagcaccctggagagttgagacccctagactaatacttgaatcttatttagaatcttagaatgggggagccagaaagagccttctaagtctaatctggtatttctcatgttctgaagattattgtttcaggggatattattaggggattctcagaaaagggttccttagccaaatgtgtctggaaactgtagcatgtgctatatcgtctcttggaaattcactgtgcttgttagaacattaaaggctctgagaagtccagaatttaaaaaaaaaaaaagaaagtgtgtgtcaggcctcaggccaggtgcgctggctcatacctataattccaacactttgggaggccaaggtagtaggatcatttgagaccaggagttccagaccagactgggcaacatagtgagaccccttctctacaaaaaatttaaaaattagccaggcatggctatgactgactacatgcacacacctatagttaaagctactcaggagacaaaggtaggaggatcacttgagcccaggagtttgaggctgctgtgagctatgattacactactacactccagcctgggtgacagtgcaagaccctgtcacgaaaaaaaaaaaaaaaaaaaaaaacctaaaattaaaagtaggttagaacacagtggctcatgcttgtaatcctagcgctttaggaggccaagtcaggaggatcacttgagcctaggaatccaagactagcctggcaacatagtgagacccctgttgtctttagaaaaaattaaaaattgcctgagcatggtgacatgcttgtagtcccagctactcagaagactgagtcaggaggatcacttgagcccaggagttcaaggctgcagtaagctatgatcgtgcacggcactgcagcctgggcgacaggaagaccttgccttaaaaataaaaacaggccgagtgcgatggctgttacatgcctgtaatcccaacactttgggaggctgaggtgggaggattgcttgagtccaggagttcaagaccagcctgggcaacataaccctgtctctataaaaaataaaaatattacctgagcatggttgcacaatcctatagccccagctactctttttttttttttgagacgaagtctcgctcttgttccccaggctggagggcgatggcgcgatctcagctcactgcaacctccgcctctcgggttcaagcgattctcctgcctcagcctcccaagtagctgagatttcaggcgcctgccaccacacctggctaatttttgtattttcagtagtgacggggttttaccatgttggccaggctggtctcaaactcttgacctcaggtgatccgcccgcctcagcctcccaaagttctggggttacaggcgtgagccactgaacccggccaagtcccacctactctggaccctgaggtgggaggatcacttgagctaggaagttgaggctccatgagccatgatggcagcactgcattccagcctgggcaacagtaagcctctgtctccaaaaaaattttttttttaattaaatttaaaaaccttgtgtcttcttgggctggtgttgctgaaaatattttttttaataaaaaaatagacaaaaaaccttgtgttgtatcgtttaaacttaggatttcccaatcatgttaagtatatgtctttacagaacaaagttccccatgatgccaactctcccttcccttttttttttttttttttttgagatggagtctcgctctgttgcccaggctggagtacaatggtgtgatcttggctcactgcaacctctgcctcccaggttcaagtgattctcctgcctcagcctcctaagtagttgggactacgggcgtgccaccacacccagctaattttttgtgtgtttttagtagatgtggggtttcaccatgttggccaggatggtctcaatctcctgacctcatgatctgcctgcctcggcctcccagagtgctgggattacaggtgtaagccactgcgcctggcctctcctccccattttatagattgaggagttggcttgtccgatggcagagctggggctacaacctagcatacttgctcccaggctagtcctcttggttaataagcagcattccttatcatttgtgccttactatttggaaagcagggtcccactattgagaactgatggagcccggactgacccccagttttgtgctgcttttactgtgttgtggcctcccagtgccttttcttagtgtatctggttgattttgtctaacgccattctggttcatccacaaagttaaatccccagacatttcttgtgggtggctcagaactttactgaatgtaggttaaaccgcagatttgtgtcaggctctgtgagacttgtaggatcattcagccacaggagaatattttctgtgccgttatccacagacattcatcaggagccctgtgtgagcccaacctattgctgggaaccagggaagctctcttcaggatggctgagcaccatcccagccctagagaaccaggagacttttctgagagatgtggtccacatgccgaagctggggagtgatccaaaatggtctggggttgaatgcagaaatgagtagatgtgaatgagcttcagcatcagggattaatgctgtgggagaaatgaaggtagcctacatctgtggtttgctcttggttaggcactgattcctggagtctgcctgagactaggacttacccgtggtccacagcacggtatcccatcctgactttctgttaatggtatgacttaaagaggttattgcacctatgggatggcttaaccggagtgattctggcctcttttggtagggtaactaaagcccgtagagttagctgcaggaccacagtaccctgttgaattcatcctctccccctcccttgccagactgaagaagctttgtaagaactaaggcagagaggttctttgggaagagaaattggagaatttagggtcatggtatctcagatcctaaccctgttctccagtatggccttcttggctggctcagcaggcttctgttgaactcagcaagctgcctgtgcccagcccttcatcactgtagtgaggatcctgctcacatctctcaagggaaaagggaccagaaaagtgatagctggggagcttgcgagtgtcttgaccatctgaatttgtcttgacaatagaaatgaagacagagatgaagcaaggagcacccaccagcttcctcccgcctgaagcttctcaactcaagccagacaggcagcaattccagagtcgaaagaggccttatgaagaaaaccggggacgggggtactttgagcaccgagaggataggaggtgggtgtatgaggcagcagtcacccttgctctggtaggtttctatatccatagcctcgtgcttgctggggacatttgcactaacctagaggggctgagtaaagattccctctgctttcacactcttcctgtcccttcccgtacttgctaccagattcagctttcctaaacttttggtccttcccccagttcctcccttcttacctgcagggtaacttctaaatatcttagactttcacgcgtgagatgccagcctgcctgttctgtcctttgccttactgcccctgcagtcagctgcttgatacccgtaatgaaagaaatatctgtttcctaacactactcccaaatacacatcctcttcccattcatccactcattcagtcagttctcacagtgctgtcacgaagtgcccactcttgggctggacactagcaacatacagatggacagtgggttttgccttctgttgttccagtgtggggactcagacacatacactagtaagccacaacctctgaggtgagtagtcaggatgcaggtgagtttcaggagttcagaagagggagcagcctctgctttggtcatttcccttccctaacaagcccttccctcctttccctccagaccaagtccttcccttccctccttccttccttcagttcctgtctgaagccttttgcaattatgaaaactaggaatggccactgtactcatctggactagtcatctgacattctatttcctatctggcggagtccaccttctaactagcttgttactgtctgagacagggcctggatctcacaggctatgatttaagttaggacatggatcccacctcatatggggttcttccactgcctcccacagagcagaagcctggaagctacttactgatggagagcaaaggaagaacactcgctctgatcctgggctggcagggaaagtttcctagaatggacttaacatgtgatgagcacagctcatccatgttagccctggcctggcgaggccagaggggccctccaccagagggaagcctgctgctgggagagtcagcagccaaatgggcatgggctccccatctgtgcatgcagtgcactgcgaccacccagactgtccaggcaggaccctgagtgttagattctacctttctacccttcttcctcgttcctgtacagcagaaaccaacagtgttaagtcccttttttagcgttttggtaggaaaatgaatatcgtttataatttaggacactgaaaaaaatgggtcatctcaaattcttacagatgtaggattttaagaagcctggtacatggatagatagtaattattgggatttatataggctcttgcacattccccttcctggccagcacccttttgggataccacagcctccaaacagtaacagagatcagtgtggaagtggttgtcaacatgcagagggtatggatcagaatctttgggtgtaaaaaaagagtgaaaaaattccctaaatgattctgatgccccccttcagcagagcatgccttcttcaatccctgtctccaccgtaggagttgacggtcattgctctccttgcaaggatgtagggtttcagagttcttttgcccacctctgtggaaggaaatggagattcaggaagcagtctggaggccactcatagattacagcagaacattcattttctttcctttgtgctcatccattgttcttgtatgacttaacccctgtttctaatacaggggccgctctcctcagcctcctgctgaagaggatgaagatgactttgatgatacccttgttgctattgacacctgtaagtctttggagtgtgcatctaattctgccttacagtcagtatggggaaattgtggtcttgaccttcaccagaatccctgctgggcaccgtccaaagacattgttagtccacatgtgagacacggcttagctctggagcaagagtactggtttggaggcaaaagacctactcccaactctagcagtgggaccctgggcaagtcattctacttctctgagcttcccttcaggaaggagtaaatctgctgtactaacctcagaggattttcagggagactcctcagtggatataggagcaatctggaaaaccctgaaccgccctgtacacacaggggttgtcatctaatcaggaagggaatctgagtgcagctggggaaacttaactctttgacaaccagttcccgtttccatcagctgctcaagttcctggtgaaaccaatgccactgtgtcctgtgaggcactaacctggcccgccctgctgtctgtcctccagttcagttttctttccactggataagtggctttcaccttcactgtgcatctgagcatttggaggaattattataaaggtcctttcgctcagacctcctagtcaagagtctaagtggtcgagcctatgaatctaaatttttacatgcacccagaagcccaatcaggtctgagaacactgcacttctcaacagagcagaagataagcagcaatttattcatctatttctacagaagcttctgtttataaagcactggctacatgctttagtaagagataaaaatatacacaatctctaatatcacaagctctcgaaaacaacatctacccagagtagaggtaaacattgtttaaaaagtgttgggtggcagtggttcatgaggcagcgtctagatgaaatgcaaatgtacagatcatgacggtcagcctttagagaaaggagagcgcctcatgggagggatggtcaggaaaggctttcttggaggcgtgactggctccttgaatattgagaatattgagaagggtaagagcaacagtaggagagtcctaggcccatgaaaggaattaggagcctatggggcacctgggcattggttcctgggtggcaggtgtggatcagggtcagatccctgtatagctattggaaacagaagtccggttcccaaattgatagaattaccacagagggcggtaggaatatatggtggtggtgattaacctttttgtattctaaaaactagtttgagcctgggtaacatggcgaaaccctgtctacgaaaaatataaaaatcaccctggcatggtggcatatccctgtagtcccagctgttcaggaggctgcggtgggaggatggcttaagcgcaggagaacagaagttgcagtgagccgagatcatgcctccgtactccagcctgggtgacaaagcgagaccttgtctcaaaaaaaaaaattaatttgaaactgctgaggatatggaccctatccctagcaaatacacatccccaccaaagacatgtgttgacaatttctgaggatacccctgaagccccatccttggatcccaccagataaagaaccccagttcctctctgaggtcatacaggccaatttgcaatactgcacatcctccctactcaaagggagagaggttgaggggtgtgctggttccttttgaaactgcccccatgatgtgttcactgtgtactcctggtcagcacttggggaagttccctctgcctgcttctttcttaggacttctaaaacatcagccaggccgggcgtggtggctcacgcctgtaatcccagcagtttgggaggccgaggcaggtggatcacctgaggtcgggagttcgagaccagcctggccaacatggagaaaccctatctctactaaaaaatacaaaattagtcaggtgtggtggtgcatgcctgtaatcccagctactcaggaagctgaggcaagagaatcacttgaacccgggaggcggaggttgcggtgagccaagatcgcaccattgcactccagcctgggcaaaaagagtgaaactccgtctcaagaaaacaaaacaaaataaaaacatcagccaactgtgggcattttccttcacagataactgcgacctccacttcaaggtggcccgagatcggagtagtggctatccgctcacaattgagggctttgcatacctgtggtcaggagcccgtgccagctatggggtcagaaggggccgtgtatgcttcgagatgaaggtgagtaggagcaagagaaggggaagggacagagaagtccatccattgtaatatcctgataccagccaccttggtcagagctgcaactgcaaaagagattggattgtgcaataccatgtccaagcagacaaaactgtgatgaactcaagacaactacatcattgctaaatatcatatcagaaaagcaggccaaccatgcattgcttcatcaagcagatatttccttggtgagatttgacccaggtattatgtagtcaaccagtgtagtgatgacatgtttgtagaactgagaaaagaagttgtttggaagaaaagtgatctagaaagaatagactcagatgtcacttattaaagggaggccagagggagaacagggcaaagaactgccagcttaggccagcctctgctgtcatctctccacagttccatgtcaagttatgtttatgaaaataatagatgctcatgtttaacaaaagttcagacagcacagaaaagtacaggataaaacaggttattctcgccaggtgtggtggcttttgcctgtaatcccagcacttttgggaggccaaggcaggtggatcacaaggtcaggagttcaataccaaactggccaagatggtgaaaccctgtctactaaaaatacaaaaaaattagccgggcatggtggcgggtgcctgcaatcctagctattcaggaggctgaggcagagaattgcttgaacccaagaggcagaggttgcagtgagccgagatcacgccactgcactccagcctgggtgacagagtgagactctgtctcaaaaaaaaaaaacaaaaaaacaaaaacaaaaaaaacaaaacaggttattctcatgtcctctcagttcccatcctaccatcctactccctggagggaacttctgtgttaacaatttcttacctgtggtttgtgtatccaaacttactgatgatagctaataagtatagagctctttgcatgcacaagatacagcaccaagctctttacatggattatctccattaatcctcacagtaccatctggaaacaggtactgttagccccagtttttagaggtagaagctgaaacacagagggttatattttattgaccacgacaccattgatgtaagttgtgcattattttatgtacctctcatagagaaacactgcaacaaaataaactacgcagtgttttctttttttgtttgtttgtttttttgtttttgagatggagtttcactcttgttgtccaggctggagtgcagtggcgcgatctcggctcactgcaacctctgcctcccgggttcaagcaattatcctgcctcagcctccccagtagctgggattacaggcatgtgccaccctgcccggctaatttttgtatttttagtagagatggggtttctccatgttgatcaggctgggcttgaactcctgagctcaggtgatctgcctgccttggcctcccaaagtgctgggattacaggcgtgagctgccgcacccagcatacgcagtgctttctcatcacatttattgtaaaatggatcctgatttcagagattttaaaatgtgtgtctgaaaagccagtgaggccacaggtagatacggatattcggcagtctagtcttttaatacgaaattaagtcagaaggctttttttttttttttaacttaatactgtatcttggacatttttccatagcagtacattagcccaatgtactgctttgctccttgttttttgtttgtttgattgtttgttttgtttgttttgttttgttgacggagtttcacttgttacccaagctagaatacagtggcgcaatctctgcttactgcaacgtctccctcctgggttcaagcgattctcctgcctcagcctcccaagtagctgggattacaggtgcatgacgccacgcatgcctaattttttgtatttttagtagagacggggtttcatgatgttggccaggctggtctcgaactcctgacctcaggtgatccacccaccttggcctcccaaagtgctgggattacaggcttgagccaccgtgcccggcctactttgctctttttaactgttgcatcatattttgtggcatggatataccataatcagtgctttattgatattttttctgatgttaaaatatatatatatatatatatgtgcacatatatacatccaatgctgcacagaatgttgcatatacaaatacagtcacacatacgtagacatacttgtccacatattagtgtatctataggatgctgagttatagagcatgtgcatttatggggttttgttgtttttttcttttaatgtttttgtaaagatggggtcttgctatgttggccaggctggttcctaactcctggcctcaagccatcctcctgccttggcctcccaaagtgttgggattacaggtgtgagtcaccatccccagccatttacagttttgatagagacttctagattgccctctaaagacactgtaacagtttatctttctactagatgttacaagagtctcttaaactaaaacataaccgtattttgaaatgcctgtctctgtggccctgtactctactgatccctttggaggccctggcttcgattcggttcaacaggcttttcagagctgcttaaacgcttcttctccagcaagaaaagccattgctattttttaatgcctgatatgcttccctcctatattggctcataacctacggcctccagagaagcaaccctgagcccttttgtcctctttcctcagatcaatgaggaaatctccgtgaagcaccttccgtctacagagcctgacccccacgtggtccgtatcggctggtccctggactcctgcagcacccagctaggtaaggaggggtcagctatgcagtccagagaatagagtgactgtccctacccttggattttcaaggctcctaagcttccttttccagcgtcagacttagaatagaactaggctgaagtggaacaggtacaaggattaggtatatgccactgtctctgtcatgctgtattcaactgagaggactatggtcatgaaacaacttttctgtgaagaatcaattcttatccttcatcttttaggagagggtccaaaattctctttaggaatctattccctttctgtaaaaaggatcagtgtctcctgcccttaaaccaagctgctgataagttcccaagctccattaagttctgtctgtattttctgtccggagcctaacctagaggaaaaaggggagcagagaccagtgaggccagggctagttgggagaggggcaggggctgcctattgaaaggttttgaattttgcgggtccccaggcttcaatgaccttctggtcccaagtgactgattattctgaccaatgctgacacctcctgccttccgtttatgatcatacaaacgttccaattatgaaaataatatgtgttgcgtataagaattcaggccatacagaaagggaaaaatgaaaatccttcctaaacctgtgagagaaactaaccaatgttaacattccatttgtagtcttctggacatttatttttttgtacatctttaaactggatcacactaggactactttgtatagccttgttttaatgtatgatgggcatatttttgtaaataactgcagctttttgactactgcataattttccattttatagttgcattatttaacaagtccccttctgtagctcatttaaacttattgcaaatttttgctgttttaacacttgagccattatcctggtccataattgcctgaccacttaagactaatctttaaaaatagatgatattctcactcacaagtgtttgtttaaaaaatatgttcacatggacttagagagtggaataatagataatggagactcagaagtgttagggggtaacaaggtggaggaggatgagaaattggttaatgggtacgatgtacattttttaggtgatgaacaccctaaaagcttgaccactatgcaatctgtgcatgtaacagaattgcacatgtaccccataaattggtacctcctcaaaaaggtagatatgttagcaccaaaaaaaaaaagtatacagttttcatttccatatgtgttagcactttttatttaagactcataagtcatctcatcttatctctgtctccgttttgagatgtaggtggtggcagttgatagggatggggaaacagcccaggaggtcaagcaccatatccagggtcacatagctggtttgtagcagaacgagccctggcattcatgcttgtcggcccctgcttttctaacagcatactctttgggttctgcccggaatctctaactcaggtgtcagccagagcccttgggatctctcagtcatatcacttcagcacccagttctgtagcctgaggaaatctagtacctttcccaggggtcagtcctcatggtctccaggagcaaaatccagccccttcactgatttctaccacaagtagactggactgaatattgggtgtcacaaggaagggttgcatctcagcatacagccattctcctccatcccaactcctgtcttccttcctccctttcttttcaaattctcccctctgtgcagagttattcagttgagctcctactcccagactggacaatgaaacccatcaagccctccaagttctacatcattaagggcttcctttcacccttccccacccctattttaaaaaggcatctgattaataaaactagtaaagaaaatgatttttttcttcaaaaataaaagtatgtggcagccattgaggctgttatgaccatcgcaggtttaacctgcctttgcctatttcttccgtcaggcgaagagcctttctcctatggctatggaggcactgggaagaagtccaccaatagccggtttgaaaactacggagacaagtttgcagagaacgatgtgattggctgctttgcggtgagtgctagcagcctgtgggagttggcagaaccagatgttgggctacagacttctttttcaggatacctctatccattgtctgccccatatccagccactctcgccatacttctttgtctctgcttgacagactggaatgtttactgtcattttgtgggaaattctgtcattccatctcctctggtcttgtgtgcaaagttttcagatgacaccctgaagaggtttggggacttcaggtgtgcatagccttcctccgttcctaggtaccagagtaacattttctaaacaaacctaggaatttcttatctttcattgctaggaaatagcctgtctgctcctgaaggcagtggtattggctcttgccccatgttggcatcatcttatcccaaaacttctccctttcttcatctcacattggttgagccaggcttcctacaatgcactgccttctggaagagtagagatgatgcaaaacagaacagctgttgctgccatacttcagtctttgagaacagtgaccagcagtcaccttgctgtgcagtatggctgtcagctctgggctggactccctggacccagttatgttcttccattcaagccctgggcaatttacccttcttgtttttcagttccctctaaatgagaatctttgcacctacctcagaattttgtgtggagtcattaagttaatccattaaaagcacttataataatgcctgacacacagtaagtgctcagtaaataccacttaatactgttaacattaggagttataagagatgtttgtaaaatgtgccgtaaggccccagaggaagtgaccacctggatggattcatcctctgaagcttattcttttgccttccttcatatttgtacacatgtactcttccttcttcttttttatttatttatttatttttgagatgagttttttgctcttgttgcccaggctggagagcaatggtgcgatctcggctcaccacaatctccgcctcctgggttcaagcgattctcctgcctcagccccctgagtagctgggattgcaggcatgcaccactacacccaactaattttgtatttttagtagagacggggtttctccatgttggtcaggctggtctcgaactcccgacctcagatgatctgctcgcctcggccttgcaaagtactgggattacaggtgtgaaccaccacgcctggccccttcttctttttttaactttgagataaattcaaactcggaaaagcttgagaataaagaattctcacagggccttatccagattctaacatttgccacatttgctttaccattttcatgtttatggtgtacatacacatagagagttaactcttcaacaatgtgtttgaattgcactggttcacttatgtgcatatttttttctttttttctttttttttttttttgagacggagtctcgctctgtcgcccaggctggagtgcagtggcgggatctcggctcactgcaagctccgcctcccgggttcacgccattctcctgcctcagcctcccaagtagctgggactacaggcgcccgccactacgcccggctaattttttgtattttttttttagtagagacggggtttcaccgttttagccgggatggtctcgatctcctgacctcgtgatccgcccgcctcggcctcccaaagtgctgggattacaggcgtgagccaccgcgcccggccatttttttcaataaatatattggaaacttctttggagatttgcaacaatttgaaacaacagacatagcctagaaatatcggtaagattaagaaaaagttaagcatgtcatgaatgcataaaatataagtaggtactagtctgtttcatcatttactagcataaaatatccacaaatctattacaaaaagttaaaacttatcaaaacttgtgcacacagactctacatggtaccattcacagttgagagaaatgtaaacaaacagtacagtattaaatcataactgtttttattttatttttttgaagacagattattttctctgtcacccaggctggagtctcgtggcgcgatctcaactcactgcaacctccgcctccggggttcaagtgattcttgtgcctcagccacccgaatagctgggattacaggtgtgcaccaccacgcctggctaattattgttttttgtttgttttgttttgagacggagtcttactttgttgcctaggctggagcacggtggcgcaatctcggctcactgcaacctccgcttcctgggttcaagtgattctcctgcctcagcctcctgagtagctgggattacaggtgcacgccaccatgcctggctaatttttgtatttttagtagagttggggtttcgccgtgttggctaggctggtcttgaactcctgaccttaggtgatccacctgcctcggcctcccaaagtgctgggattaccaagtgtgagccactgcacctggcctaatttttgtatttttagtagagatggggtttcaccgtgttggccaagctggtcttgaactcctaacttcaagtgatctgcccacctcggcctgcgaaagtcctgggattacaggtgtgagccaccaagcccagccaactgcataaaattaaccagcgcatactgtaataattttgaagccacctcctattgctattatggtgagctcaattgttgcaagtttctacttaaaacactgtgtgtcatacatcttcacgtgagcagttcttttcggtaaattgtgtatcacagtaaaaagtgatctcgcaattcttgtgtattttttaatcatgttactgcaatatcataagccttgagtagcaccatgggatccatacgaagttccactagtgatgctggaagtgttgctcagaagcagaaaaaagttatggtattacaagaaaaatttgaattggttgatatgcactatagattgaggtctgcagctgtagttgcctgccatttcaagattaatccagcataaggaccactgtaaacgaaaaaaagaaaaaattcccgaagccatcactactgctgtgctagcaggtgctaaatccctgcactttttatcatatattgacaatgcaaggccggacactgtgactcacacttgtagtctcagcactttgggaggccaaggtgggcagatcgcttgagcccaggagttcaagaccagcttgggcatcatggtgaaaacaaacttttaatattttataaacataaaaattaactgggttggtgatgcacgcctgtagtcccagataggaggctgaggatcgcttgagcccaggaggctgcagtgggttatgattggcccactgcactccagcctggatgacagaatgagactctgtctcaaaataaataaataaaactgcagcttttgtgtaggtacagagttgctataagaaaggcatacctgccgggcacggtggctcacgcctgtaatcccagcactttgggcggccaaggagggcagatcacgaggtcaggagatcaagaccatcctggctaacacagtgaaaccccgtctctactaaaaatacaaaaattagccgggcgtggtggccagcgcctgtagtcccagctactcgggaggctgaggcaggagaatggcgtgaccctgggaggcggagcttgcagtgagccacgattgcgccactgtactcccgcctgggtaacagagcaagactctgtctcaaaaaaaaaaaaaaaaaagggcatacctataggctataattcaagaaaaagtgaagtcattatatatgacaacataaagcaaaagaaaggggaaagatctaaagctgctgaatttaatgccagcaaaggatggtttaataactttagaaagaggtttggcttaaaaattctttacaggaaaggcagcttctgccaacgaagaggcaacaaacaagttcccaggcatcattaaggtataattgaagagaagggatatctgcctgaacagatttttaatgccaagtgcagtggtatgatctcagctcactgcagcccccgcctccccggttcaagctattctacctcagcgacccaagtacctgggattacatacttgcgccaccacacctagctaataatttgtattttttgtagagatggggtttcgccaaactcctgagctcaagcaatccgccctccttgacctcccaaagttctgggattataggccggagacaccatgcccagcaaattctgtcagattgatgatcaggactgttacttataaagctggtaactctcaaaccctaaatcctcaacaccagttgccagtcatttggttgtacaacaagaaggtgtggatgatgaaaatcctttttctagattggttccattgatgctttgtttctgaagttaggaaatacctttccaatatgtggttcccttttaaaattattttgatattggagaatgccaccaagaaccccatgagtttagtacagaaggggtcaaagtggtttatttgtccctaaacaatgggctgacccttgaactttgcagggattaggggcaccaacccccatgcggtcaaaaatccacgtatagtttttgactcccaaaaacttaactactggctgagcgcagtggctcacgcctgtaatcccagcacttcgggaggccaagctgggtggatcacttgagcccagaagttcaagaccagcctgggcaacataaggaaaccctgtctttaccaaaaatagaaataaaaattagctgggcctggtggcacacgcctgtggtcccagctactcaggagactgaggtgagaaaaaaaaaaaattaatagcctactgataacataaacagtcaattaacacataggctagtgtctacaatttttatgcactcatatgacatacctaacttttcctttttttttttttcagtatttctagtcatagggatctgagagttttttcaaattgttgcaagtgtccacaaatattttcagtatattgaatgaaaaaagtacacatgtaagtggacctgcccagcttgaagccagtgttgctaaaggtcagctgtgttttcatctgacccatttgagaggaggttgcatacatcatgtcttcattactttggtctgtattccttcttttctttttttttaataaatgagacagggtcttgctgcattttcacaggcggtgatccctcttctgatcagcatgagagttttgacttgctttgtttcctaccttggctagttcacccctccttaggcaacctgatggtccctaactcccaggaggtcaccatatcaatgccgaacttagtgtggacagccgattggcatagtgcactacagcccagaactgggctcaagccatccaccccaacctagtagctgagactgcaggtgcacggcactgtgccaggctcggtgtgtactctttttttttttttttttttttttttttgagagaagtctcactcttgtcccccaggtttgagtgcaatggctttatctcggctcactgcaacctccgcctccccgggttcaaacgattttcctgcctctgcctcccaagtagctgggattaaggcgcctgccaccatgcctggctcatttttgtattttttagtagagacggggtttcaccatgttggccaggctggtctcgaactcctgacctcagatgatccgcccgcctcagcctcccaaagtgctgggattatagatgtgagccaccgcgcccagtcggtgtgtaccctttttgagacggagtcttgttctgtcgcccaggctggagtgcagtggcgtgatctcggctcactgcaagttctgcctcccaggttcaagtgatttttttgcctcagcctctcaagtagctgggatcacaggtgcacaccacgacatctagctaatttttgtatttttagtagagacagggtttcaccatgttggtcaggctagcctcaaactcctgacttcgtgatccgcccacctcggcctcccagagtgctaggattacaggtgtgagccaccacaactggctgattcttaagagtaaagatattaatgacagtaaagttattaaatttaaaacttgatataatgctattatctactgcgcattcaaattttgtcacttgtcccaacaatattctttcgtccagttgagtttctagttcaggatctgatctggcctgggatcatattgcattctcttgccatgtgtctttagtttcctttagcctgaaacagtttctcagcctttttttgcatttcaggatctcagtatctttttgtttttgtttttgagacagagtttcgctctgtcacccaatctggagtgcagtggcgcaatctcagctcaccacaacctccacctcccaggttcaaacgattctccagcctcagccgcccgagtagctgggactacaggtacgcgccaccacacctggctaatttttgtatttttagtagagtcggggtttcaccatgttggccaggctagtctcgaactcctgacctcaggtgatccacctgcctcagcctcccaaagtgctgggattacaggtgtcagccactgcgcccggccctcaatatgttttcaataaaacatttttaaaatgaaaactgtgttcatactctacaaattgttcggttttaaaccttgcatttttttcccattgaagagtaaatcttggccatctttccctgtccacacagacaatatatagatctagctcagttaaagttgtttcttaatagttaatcattgtgaattgattttttcaagaatagggtttccaaaaaaaaatcgaggaatgtaaaaggggatacagtgtaaagtcttctttagacaccccccctcccgccccacccatttttcacatataccctccccagcatgtgaacccactggtactcggggtttcatctttttttttttttttttaacttgtatgtcttgggggtctttttatttatttaatttttttgagacagagttttgctcttgttgcccaggctggagtgcaatggcatgatcttggctcaccacaacctccgcctcccagattcaagtgattcttctgcctcagcctcccaagtgctgggattacaggcatgcgccagcatgcccggctaattttgtagttttagtagagacagggtttcaccatgttggtcaggctggtctcgaactcccgacctcaggtgatctgccctccttggcctcccaaagtgctgagattacaagcgtgagccaccatgcccggccttggtggggatctttttatggtactaccaagagagcttctttgtacttttatattgtctgtagtcattgtatgactgtaccataattgatttaacctagcgcctccctttggtggacatgtcgttacttttgcagctttgtatttagtgactgtaatggctgtctagtattctgatgcaggggtttgggtaccctgctttaatttagcccgtcttcctgttagtggctgtgaaagttgtttcctggaacagataaatgcggcttgtcttttttccatttactggagtaacttggagatctttttgtagccccacatatggatctcctgtgcaatttagccactcctacttccccattggagcacattttccgtgctggcatgagcattttgcacatagaattttgcattcttgtgggaatgtagttgtattccttcttgaaagttagattctaagtcaaaggtatatttttaaattttcatagctaccaccaagactacactccaaacaggttgcagtaatttaacttgtcactgtgtgacagtgtttgccaaagtctgttctttcagagtatgaggttcttttggtatgtggcagtatggaactctaggccttgactcttgcttcaaccagaacatctctgcatccagtcttaagattccttatatagttttctttgttcagaagataccacaactttaaaaaggctcagggtgaggagttggtgggggtgtaaaaatcattggtctcctggaacaagaggggaggacattggtgtcaaatatcaagtcctcaatttgcaaaacaaaaaggtaaaacagccttccaagtggagaacagaataacccatttcagcaaaccataaagagtatgatacttagagcctagggacaacagaaagaggtgtgagacaccaggctataaaaatggcaggctctgaattatgccaggcttcaggagtttgggtctttaggcctgggactgacacaggagtgtttcagcaggaacaacaacacaactccacttgccttttggacagatggctctgttggtggtagatgggttggttgagggcgccggtttctgtgcattatgggaagttcctatagtgaagctggtggccataaggaaggctaactaacaccaacagtcatacctgctctccatggtcttttttttttttttttttttgagaaggagtcttgctgttgcccggctggagtgctgtgacatgatctcggctcactgcaacctccaactccctagttcaagtgattctcctgcctcagcctcctgagtagctgggattacaggcactcgccaccatgaccagctaatttttgtatgtttagtagagacggagtttcaccatgttggccaagatggtcttgatctcttgacctcatgatctgcccacctcggcctcccaaaatgctgggattacaggcgtgaaccaccacatccagccgctctccatggtcttgacgtgggtgcatgcttagagatgaacaggcatgagggcctctgacacagagctgtgccctgtgagcactgaggaggttaatgaggaagctcctcaagggagggtgcttctgtcgcttcttgaagggcaattcccaaggtggtcacctgaatagagaaagaaattatactttcatatcagaaagcgaaccgtgtattttgcttcagtctgctatctaatctcaagttttgagccttttcttctctgagatgggcatttagaaaaatatttaacaaacgttttaaaaatataaattttaaaaaggcaaaaaaacactaagaaaaaaaagagcctctcgtatcctgcagccaaagcaatgtttccaaaacacagttttgagcaggctgctcctctattcaaaataagtcagacactctgctctgccaccagcatcaagttcaaattcctgcggtaaattagagtccctcacatgccgaggtaggccgtgtcccctcccaccacttcagtcccagccccttatttctagcacagtgcctgacattttgcagtgatagctcacattccttgtgtgctcactgtgtattaaatgtactagcccatttaacagttagaataaacataggctgtataaaatattattaccccgcccccctttttttgataaagaaacaagatgaaataacttaaccaaggccacaagttagtaaatggtagaactgaagccatccaccttctaaaatgggatcataggctaggcgtagtggctcacacctgtaatcccagcactttgggaggctgaggcgggtggatcacctgaggtcaggagttcgagaccagcctgaccaacatggagaaaccccgtctactaaaaatacaaaattagccgggcgtggtggcacatgcctgtaatcccagctaattgaggcaggagaatcgcttgaacccaggaggcggaggttgtggtgggccgagattgcgccattgcactccagcctgggcaacaagagtgaaattccgtctcaacaaaaagaggggggatcttaattactaactttagcaattcaataagtagttgttacagaataaatgaatgtggtccctgcatggctcttcagctgttcctgaattacttccccctcatcttttatgcctcagccaatctgaccttgtgttctgtcactgctaggcttatatacaagcaactgagaaacctcagaaacttgcttctaggtaggtcatcttactgaattatgatagagtgtccttgtctcattccccactggtcgctaagctctgtcggtcccagattatgcagacatgtgtatcagaaagagtacgaactcagggaacatgttgaacaagctgaactcagttcgaaaaggccctgcggtggctttccttcatctgttatattcatagactgccctttctgggtttcttttgtttgtttttgtagagatggggtctctttctgttacccaggctgtacttgaactcctggcctcaagcatcctcctgccttggctgctcaaagtgatgggattataggcgtgagccactgcacctgtctcctcatcagttttcaggacaggactggaccaccttttccttcgtcttcatctcagtctaggcacaagactcaaatacttggagcttcttaaaattacctgctttaggacaggtgcagtggctcaagcctataattccaacagtttggcaggccaaggtgggaagatcacttgagtccaggatttcaagaccagcctgggcaacataacaagaccctgtctctacaaaaaaatttaaaaattagccaggtgtggaacatgcctgtagtcccagctactcaggaggctgaggtgggaggattgcttgaacctggaagtttgaggttgcggtgagccctagctgtgccactgcactcagcctgggggacagggtgagaccctgtctcaaaaaaaaaaaaaacaaaaaaaaaaaactcttgcttacttgcttcatatccaccaactttggggtcttaggcaaggaggactttgggctggacattctctgagatgttcactgatgctgcccagcttacctgtatgttggggaaggatgcacttcaatctggaaagctgtccacattctactccctgcatctactgtcctcacatttgactcccagtgcctatggcaagagttggcaatcatattcctttggctttttctcctaggattttgaatgtggaaatgacgtggaactgtcttttaccaagaatggaaagtggatgggcattgctttccgaatccagaaggaagccttggggggtcaggccctctatcctcatgtcctggtgaagaattgcgcagtggagttcaacttcggacagagagcagagccctactgttctgtcctcccggggtttaccttcatccagcaccttccccttagtgagcgtatccggggcaccgttggaccaaagagcaaggcagaatgtgaggtgagtggggccagaatgtattggtggccaccttgctgccaagacagaggagacacacacacacacacacacacagacttgctgcgagagtagccttggggcaagtggccactttgtcccagctcctcagggttggactcagagctgaaaagctgctctgagtgtgaggtgaggggtgttggtgtgacctaagttgaagtcggagaggctacctaaatctcagaaagattgcatcttcttcttaagtgaggccagaataggggaaaaggaggcttttcttacagcagaaaaggacactaggcgcttcttggggagtgcactgtgccaccaagtgttctttttttttctttagagacagggtctcgctctgtcacccaggctggagtgcagtggtgcgatcacggcttactgcagccttgaccttccaggctcaagtgatcctcccacctcagcttctcgagtagctgggaccacaggtacatgccaccatgccaggctaacttttttagccactgagcctggcccaccgagtgttcttgaaggaggttgagtaagttccacctctcacccagagctatcaaaagataaatggcctttgggaagatttgattccaagagctatactagtgtcttttttcttaaaacaatatttttcttgtatgtgtaagttatttatgcttgttctagaaaattaagaagtaaaaaatttaaattttcataatgccatcatctacaaataagtttacttgcagagttttggagttcatctgttctttttaatgtctaagtgcctgttttatgctcacaaacatttatcattgagattctatggtataagcattatgataccctgctcttttcacttcacattattttgtgagctttatcccatcacataaaaacctctctttgaacatcattttttcttttttaaaaatccttcaagggaatgaacgtcattcttaatggccttacaaactcgccactcccccctagtcgggcatttaagatgcatctgtgtttaccaaattctaaatgtactgattagatacaattcatgtccttgtgtgtgcagctctgttcctatttcatacttaaagaaagttgtaccacttctacccactccatggggccagtcccagtacacagccttccctgggctattgcagggggcggggaatgggtcacataatcctgtaaatgggctgggtttggtggcaaatgcctataattccagcactttgggaggccaagaagggaggaggatcccttgagtataggagtttgagaccagtctgggcaacataaggagactctcatttctaccaaaaaaagagagaaaaagattagctgggtgtgatggtttgtatctgtagttctagctactctggaggctgatgtagaaggattgcttgagcctgggagttcaaggctgcagtgagctgtaattgggccattacacgccagcctgggcaatagagtgagaccctgtctcaaaaaaacaaaatactataaatgctaatgatgacagcacttggttttttgtttttgttttcccccgaaagtcctgggattataggcgtgagctaccgtgcctggccagcacttgacttaatgctcaccctgtcccaggcactgtgctcagagtctgacaagcctgatctttttgaatcccgataccagtactgtgaggtagatggtattactgcttccgctttgtagaggcagccacagctcagaggtccagagtcacactcacagtcaccaccgagccaagtggtgccataccaccatgccgcaacaccttccctgtcttgttcttgtagattctgatgatggtgggcctgcctgctgctggcaagaccacatgggccatcaaacatgcagcctccaacccttccaagaagtacaacatcctgggtaccaatgccatcatggataagatgcgggtaaggccagccactggactctccttactcacctccaacctactgagtgctgccctgcaactaaaatcactcacccctcaccaattcctgcccgcaggtgatgggcctacgccggcagcggaactatgctggccgctgggatgtcctgatccagcaggccacccagtgcctcaaccgcctcatccagattgctgcccgcaagaaacgcaactatatcctagatcaggtacttaatgatgaccattgtgtcctcaggagaagggaggggaccccttgcatgcctgagaatctccctctggtccctttcttttttcccccgtaatgatgatggactgctgtgctagtcgggggggtcagaccttgtcatacatgatgacatggtactacacacagctgagcctggactgggatcatgatctaggcctacttactcagactcatcagcagccccaaagaacatcaggtaagaactgtttagcaaaatggaaggagtatggatttccaagcctgagagactggagcttgaatgccagctcggctactccctagctctgtgcctttgggcagctgactttattctctgaatctccatctcttggtttgtaaaacagggatctcaataccatctgcacccctaacgcaggacctggcacttagtagctggtgattattgttaaatactctacagaataggtagagtagctttcatgccaacagcagtgctgtaaggtaaatgctattattgcttccgtcattttctcttcacaaatacgtatgactggcaggtacatacctaagtcatattttctacctacacttcagttaatggtggagttcttaacatcagggaccttggaacctttgtatttgaacataaatattgtatgcagctgcaggtgtatcctttttatgaaaaagaagggaaaaaaaaacagttttttgtccctatctttcagcattctcaaaaggatgagtgacccaaaaatcattacagattcctgtctcagagtaatgagttccacatggttattgcctatgcaacgtcattgcctattgacatttgtcctgaaggctttcacaagtaacaaagggtgtctccttattttctatgtttggggatctgtgaatgagcctctgttcccttcagccttgcatttgtgctttcttaagaacctgtgagtgagcaaatatgtaaactaagtaacaccctgcccttgtagccttcctgaagtgccttccatacgtgtaggcctggatacttggtgaccatgagttcaaagggctcctgataagagtggaggtggggacagcgtttggctttgtcagaatggtagtttgcttgttagaaaggaatcgccagagaccgagttgccttcacataggaatgaggatcctacacaaaacagttgagcacaggatagtctaaaagccatccgtggttatccccccagctcatattgtgtacaatcagtgttctctccgctttgaagatttgtcttttaaacccttggcctcactttacctgatcctccttgtcggggcattcaagaatttttttagtctgtattgaccccagttggactcattgtcgtgaaagggagagcagtaataccattttaacactctgaggatacatacctcttttggataccctagccagtattcctccctgtctttttcttggtttgctggttaaatcagctgtgaaactcatttcaaatatgtggcctaggggagaatgattatagtctagagtggatcgtctaacatctctgtccaggatgctgaagtgggttttctctggaagccaggcccatgacagctttgcactctgaagacctactgtcagccttcttggctgctgctggcttgttcagggacagggtctagggctgtaccaggtatgcctgtggtcttcagggctaccagcctcctgcttaagggacatgtgggtcaggccaagagatcttggccaacaatgagacagagaacctaaactctgaaggctggggaggagggttctctggttaaccacagattggaggattgcctcggggcctgaagccataggctactcaggctgagggagggattgtaaagccagtggtttcacctgttttggcctaaaccccaaaagtgggttccagaaaactctgggtatgagaaagagggagggggaagttgtgtgtttgtgtatagagggttcagagcaggcccctggccaatcctggcacttccattccaccagctttggcggtgacaggtaagttgatgatgcatagctgtctcctgggctaggtggaatttccaaaggggaaacccatactacaggcaaaatccctgcagttcctggatctcagcccagaaccatcttttgcctttactggtttttcctgagtggtcagatctccccagatttggctcttccagcctcctgttatgtaggttggccttagaaatgctcatccttgagagggaaggagaggttgtctgcagaagccaggtgggcctttgtaagccaggattctgtgtttgtctggccaggactctaactcctaccctgggatgtatgtgattgggcacaaactctcaggtatatcggggctttgacctacattctgtgataacctgagtagccttttgagatgatgtgggcatcacagctgtggaacatcagaagaggaaaaagaggtagaccagagaggaagctgaagcctctgcagaggactataggactgctaagtcacgcactcagtgtactgatagatcacagctctgctgacttcccaaacagccatagtctagaatggttggggccatggtgggaatttggggaagctttctggaggtggaatgtctgagtcggggcacagaggatgattaaaagagttggggctttgtcctgaggagagtggggagtcatggttaggttttcatccggaggaatgtggataaatttgcctggctagtaaaaggctgcagaggagagagaaaggtggagtagaaggccacattgcttcaggtgtctctttggggtcctctgttggaggtgggaagcctctggaatgagatgctttctggccttgtcccagagggcctcaaaatggagtacagaacaggaactgactggcctgctgtgaggcaaacaagttgcctttctggaggcttctggggagcctccgcagggccatgttgcccaagcccaccccagagtagggcactgttgcctgggagttccgttagagggctctaacagctagagccaggccaggcatcagttagaatcagggctggatgggttgacgtcacagtcagaacatgtcgttctagtcctcatttgcatcctggtcagcaggtgccacactttcgcctgaaacagaaacccagggctagaatagtctcccaccgtaacctgtgtcttatttgcaggccttggaggaaggatgtttctttccttcatccccagccagccatccctagagcctgaagcccattccattcttgacacaccagccagttctcttcctataaatgtggttcttttgactggaattcacctcactctgagcccaaagtaaatctttcctcatcagccttcactttgctcctcagatctagctaggtttctcctgctgccagtatgaccctggtgagctgtgacaagtgagagtagacagggacagtggggcttgagagatcctgggctgtcacatcatcattcgtacctgctgtgttccctcctccctccctcagactgttatacaccaaaactccccatatagcttctctgagaaacccaactcttgtcccttagtccatgtcacagggttcagggaacacagacagccacattttctcttggaatcaacatcttcaagcagggtgggactgggagaagcagaagctaggcagagggaaccaaagcagctggaaaagctgacctagctgttgtgctggtctcatagcaacagctgccagcagcccccagcgaccacagaagtgctgggctggcccaggggctgtgacctcactgtgtttgctgtggcaacagccaccagcagctaattccctttcctccaggaaagccaagtatttgcatttctgctggtgtggtttagatactcttcttcccttccccaaacgaaggagtaagtggagggaggtgcagtcttaaaaaccactgctgagttgattctcagcacctcaattccaaagtgcctgagaagccatctctgagtctacccacttccaaggacaaaggccagctatttataagtccaatctgctccacctccattcctctcatcccatgaagctgcaggggctagccgtcttggcagcattgcttctcttctctgtcccctcatcaggacattgacagggcagttgtaccacatggaagacctccaggactgtcactccatgccctcgcagttcagaggaatcaaagtaggatcacttaggggcaaaaaaaaaaaaatgcagaatggtctggggccatattcaccctggcacctacctactctgagcttttgtgtcagaagaaaattatatttagctgaggaagccaaactctttcttcctatgaccagatgccacgttctgctttggttttaggaatggagtcaaagaagagtagtggggagaggggacttaacttttcctctgtaacatgatgttccttttcaaaccatttgtggcccaagtgctctttgtgggccggtgtccaagaccccaagaacagtatgtgtgtgcctgtcacccacatgactgcccacatcctccttcgtgagggtagggacactttccctgggggacagggaagaacattttttcctggcgcgtgtttcagggccagaggatctggttagtttaagcaactgcacccacggccccagaacttccagcagatttgtgctggagtccttggcccctggctaatccacatccagcaccctgttcctatgtcttagaagacgatctcttgaaaccttgttttttcctcaagcttcaattttccttggtattttccattgggaagcctctcctggatagtcagtcctgtaggtcttattttcagatccactctgggtgttgacttttcactgcccactcctttggcactagccagagatttttacatctgcaaatgctctccagagccaggacgagggtgatgatccttgtctttcagacgaggaaatttgagactcaggctacttggggacttgtctgagtctcacaaatagtaaagggcacagcggggatttcaagcccaagtttcttccccaaagcctgtgttcattccaccctgtctcactgttcctgcttttctgcttgggaggtcactataagcttaaccttttctttggtctgagttgcttcaagtcaacatgacagtataaatatctacccagtgatgaccacatcaatggcagctcacagttgttgagtgttggctatgagccagggcctgggcttagacgagggcttttactcacgtggactcattcagtcctcacagcaaccctaagacatccatgccgttttcccttttcagggcttgattttacagaggagcaggctgaggctgggccatcccagtgcactgcccgcttcctgtcaaggtgtcttctgccctggaggccacctgtgtccccctacttgagtagtttcttgcactttgtcaattgctttatggacattctcttactcagtccttgccagcccagggagggaggcttttcaaccccgtattacagatgaggcaactataaggactggccaaggtatgttagtagccacaccaggacttgaccctagactctttgcacccaagcaggccacatcttcagaatacatttttttttttttggtccatttgtatatacccctttacagactgttttccccatctgtggcttctttcttgggtccctattagagccactaaaaaattgtttaaatgcagttaaaaactccttactccgtttctgctgagttcctgagtttccatagggagggtacctgtataggtgcctgggtcttacttctagaggttcaggctcaggaagtctcaaatgaagtttgagctgctcactttttaagtagtgtcctcgtgattcaagtatacaggctgagtctatggaaccctgaatccaacagaggtaggccccattcccaaagggcccgacatgaaggaggtgttcggtaaatggaagccgatgttgttactgctctcaaccacatatgtgctagagcaccgctctgccagcaccagcccaggacacacctgccatcacttagaggaagggaaggaaacattaggagcaaaactgcacttgcgaaaagcagagtctcctgatgtgtagagcttgctggttagaagcttgtgggtgaggctgatgtttcagagaaggactgagggaataaaagaaccaatgttaataagaacaaactacaaaactgtccaaaggagctggttaattagtagcatagctaatctataggtattacacagccattaaaaaagaatactgcacagaaaaacttcagagaaagtttcacgttacatgaaaaagcctcaggaggatgtgcataatacaattctttttgtgtaaaaaaatcacatagatatttctaaaagtgcacggaagaaattcattcttcattctctctgggaagtagggctggcactaagggaacacaggggtttttcctctaaactttatgccttatactgtgaatttttttaccaagagtatgtattagcttttagaatagggaaaagaaattgtaaggtccagtaccaagaacaaataggattaaaaagcaaagtcccaaccattaggaatcctttgccctgtgcctgtctgcagccacttacctaagtcaattcatttgctgagggtgactcaagaatcttctaagtaaagaagagctgtttcctgagtttctctgcttacaaggagcactgatatccttttctcagtccctggcctacataatacccctcagaggaaaaaaccaactcttaatgtaccatctcttgcctcttctgttaccttacccttagacaaatgtttatgggtcagcccagagacgaaaaatgagaccatttgaaggcttccagcgcaaagctattgtaatttgtcccactgacgaggacctaaaagaccgaacaataaagcgaaccgacgaggaagggaaggatgtcccagatcatgcggtcttagaaatgaaaggtaggaaatgagtgcttcccagaggaacgtcaatgcagggtcctggagagaagaagctctttactcagtttgtccttccctggctccccagtgatttcttttttgatcttactctttctttgcttctgctttgtcccttccttgtctaccacagctgtgaatggaaaagctacccatctgtcttatgttggggttttcaggctggatggggctggggcagcacaagggaaaggatgtatgggagctaaagctgaaagtcctgtgtgctcaccctgcctctggtcccagatgggctgactgtgggcaggcctcagtttgtttctctgtaaatatagggatggtgatgccatctgtctgacccattccctggggtgaggcctgagggagctgtgcactgtgtctaggtgggtcttagccacctcttcagaaaacggaggagtctttgttagcccctgacacttagcaggctgaggggttggggctttgtctacctctttctctctctctctgtttttttttttttttttttttggagagggagtcttgccctgtcacccaggctggagtatagtggtgcgatcttggctcaccgcaacctccgcctcctgagttcacccagttctcctgcctcagcctcccgagtagctgggactacaggtgtccaccaccatgcctggctaatttttgtatttttagtagagatggggttttgccatgttggccaggctggtcttgaactcctgacctcaggtgatccacccgcctcggcctcccaaagtgctgggattacaggcgtgagccaccgcgcccgcccttctgtctatgtctttcttattcactattccagttttcttcaccttctcccttctggaaggccactcttctgggtggaggggaccagacttcagaaggtactgacctcttcttcttgttctctttggggcacttccttcctcctagccaacttcacgttgccagatgttggggacttcctggatgaggttctgttcattgagctgcagcgggaggaagcggacaagctagtgaggcagtacaacgaggaaggccgcaaggctgggccaccccctgaaaagcgctttgacaaccgaggtggtggtggcttccggggccgcgggggtggtggtggcttccagcgctatgaaaaccgaggaccccctggaggcaaccgtggcggcttccagaaccgagggggaggcagcggtggaggaggcaactaccgaggaggtgagacatctcacacacagcactctccactttctgttcccaggttggggctgggctttgactgcttattcaatcagcaactgaagttttctgagctccagctgtgagttatactctggtagaaaacttgaaacaagtcagacacggagacctcagaaacgctcccactttcccactccctggacgctggttatgaagccctttgcccatttgcatatcacagtgcacattctgtcacattgctgtcatttttgtgaaccttcccccatctgaccatgagctccttggaaataggatctagatcaaaatctattggaaatgggggctacatctttggccaggtctgaagaggactagatgtgactcgttcatggctgtcaccagtgcttagcttcctctcattttttttttttttttttttgagacggagttttgctcttgttgcccaggctagagtgcaatggtgtaatctcggctcactgcaacctctgcctcccggcattcaagcgattctctcgcctcagtctcctgagtagctgggattgtaggcaagcaccaccacgcccggctaattttgtatttttagtagagatggggtttctccatgttggtcaggctggtcttgaactcctgacctcacgtggtccacccgccttagcctcccagagtgctaggattacagatgtgagccaccgcaccctgccagcttcctctccttgagcatctccttcctgcatattcaacagctattgagatgctgggacacagaaacccaggactgccttggtctctgcctcaccattcttgcagtccagtgaatgagacaaacctgtcataagggctgggacaggggagtatgcccgggggtctagagaatcccagaggacatgctttgttgttcaccttgagttcttgctctgcgcctggccatgccggctcacagtagtcaccaagacaacccagttccctggggttgccatttgggaatgatggcgcctttcatctggatttctccaacacaggtttcaaccgcagcggaggtggtggctatagccagaaccgctggggtaacaacaaccgggataacaacaactccaacaacagaggcagctacaaccgggctccccagcaacagccgccaccacagcagcctccgccaccacagccaccaccccagcagccaccgccaccacccagctacagccctgctcggaaccccccaggggccagcacctacaataagaacagcaacatccctggctcaagcgccaataccagcacccccaccgtcagcagctacagccctccacaggtgagagaatgagtgtgtgtttgtatgtagtgatcgcacgtgtgcttttgaacctgagcaagttaggtggaggcggatctggggaaatcaacacatgccccagctactggtcttcactctaacctctagcctgcccttctttctccctggccgtgatcttgactcagatggaccctacacattcccagatcccctccaaacccaggagtaaatgtagaccttcccagaacctgctcttctcccaccaccctcaaggggatgggctgtaagcactgatccctccagcaagtacattattcttggctagtgtcactaacctcactaaatccccaagaaagcacttgactggagtcaccccttgcccaggctggctgacctctttgtcttttggacataataaccagggcactaaggttgctgaggacttgccctctgcacagagagcttcaatcctgagcagctccaggctcagttcccattcttggaaagccagtgccctggctctggtatgcacaggctcctgtaaaccagagaggttttcagttatcgcacagccatttcccaagcactttcctcatgccgggcctggaatcagctgccaggagaccaatggatggttcccaggcccagctaactagaatatttcttagaacaagagttgggcaggcacagatccaaacccccagccccacaacatcctgtttctgtgagcttggacaaatagcttcccgtctctgggcctcattttcctcataaaggtgttagtagaagtcccttccaaggtttgttgtgaggaatgggtggcactatagctctgggactaggcagacctggggtcaagtcctttttccttggcccagaaatttcatcttgagcctcagtttctttctctttaaaatggggctagtgggacctacccctaggttctatatggagattatatgatgtaatgatccaacctgtacttgggaagcacttagtcaattgccactactgtttctcagcagatcttccagtaacaactaccaccacctgttgagtacccagtggtttatacacacaagcttattggatacccagggcaagctaaaggagttgttcttgttctattgtgattctcattttataaaaaagaaaactgagatttcaagaagtgccgtgtaccttgctccctgggggtctcagagctggggttagagtccacatcacagccctggggcttgcccttcatcctgccctaccatggcatggagctggctctcctccttctcagcccacaaacaatgtccactaggcaagggaagggcccctgtgggccaaccacttaaaaaggccctttttccatcccagcatttcacatctgcagatttcctctatttcacagagctttggcttttttccctccactttccagccgagttacagccagccaccctacaaccagggaggttacagccagggctacacagccccaccgcctccacctccaccaccacctgcctacaactatgggagctacggcggttacaacccggccccctataccccaccgccaccccccactgcacagacctaccctcagcccagctataaccagtatcagcaggtaggtgccagactgggggccaactggatggagagacttccatgggcccctcctgggtgtgtattcccagacttaagtccctgcttatccctaaaaagacagcctgctggcctcggcctggcgttcatctggtgcagccattccatttggtcaacacttctgcactggttgctaggtaattggtatcctagccccctccacagtctagcaagtgaaggggaagggctggcctaagtaccaggggcctcagagtcctctttcagcaccatagacagggggctccaaatcctgctgcaggttggtgcccaggcccccatacctgttactaaatcttttgactatgatatctagctatacccaaaaggcactgggttgacaagctgagacctgggcttcagtccctaactgcctacctgtgtggtgtcaggtctttccaaggtgccttgatttctctgtcaggggacctgtgttcaactgttgtcactgcagctgtctctgccctaggtgagggtggggctggtggggaggctaaatgtgtggtggatgcaggacaacttggtgttcttggtttctttccccagtatgcccagcagtggaaccagtactatcagaaccagggccagtggccgccatactacgggaactacgactacgggagctactccgggaacacacagggtggcacaagtacacagtagccagtgtgacccagaggctcccggaggcccctgccggcttcctccaccagcgcctgcctcggcccctcctctgcccccgccagatcccgtggtgctggggatggggtcatcccagggctgcctccctccagcccactgcctcccctctgaggggcttccttcccctccatagggccaggcatttttttctggattcaaacaggcaacaatgaccttttattttctgtttgtccccacctccccagccttccacctcctgttcttcctaccttcttcctttttgactaaataatccccacctcccttgatcatacagtgaggctacagtgactgaggggagaatcccctcctgttcactctcccaaccctgctccagcccctcagcttcccagaccctcatgcagttggttgtaaattctcccaggagctgttttactgtctacttttcaggattaaaaaaaaaatcaaaacttaaaaaaaaaaaagtttaaaaagcaaaatggggagggggaggaagcagtgacttttttttggtaattatgcgcttttttttaatttttagaatttgtctttttactgtgggtgggctgttgatatttcatcaagataagcatttctttcctgagttcaggtgactgaggaagagccacaaaacaaaacacaacaaaaccaaaccacagaatcatctttaacccaactttttatacgatgccccagttccccataactttgcacacaagcttctgtgttcagttgaattgtaactgctttttgtatttggagagagtgactattgaacttgaaaccttttattccgggcgtcttggtagtttctggtgggattcagtgggtgagagggaagaaggggaggttggggggctccttcccttcagaacttgaagtttctcccactgcctcctctccagtggtctcccaggtgccagacccaaaagcttttcctacagtgataccctttatttttacttccccttgactcatatgttttaacatgattttaacaaactgcacttattaagaaatgtgtttgccctgttttgtttggtttcgttttgttttctttgaataaatgacatggcacctcctagcaggaaggaagcagggttgaaaccctgaagtgttactgcagttggccgttaattggggtgggggcctctttaaagggaaattatttactcattcattaaacaacttaactgagggattcatgtgcctggccccgattttggtgctaaaaatgcacgcttaaacaagggtccctggtttaaaatccactagttcatttttaaagtgcttctcttgttctctacctctcacagtctaaaatccctccaggagtttttgagtaaaggacatggaacaggcctctaggtggagggatgggtgggactgatggggcagagaccagggctggtttgtttggcatcatcactgggcatccacagaccacctgcctcaggcctggcctgtgtgcagcacggaggacagttcctgcctgttctgtgtttggggctcatggggattccaggagcttcatgtttcagccagtgtgtgtgagccacctgctgtgttcttcagctgtcctggacagtgctggggacatagtatggccacggcagtcctggaccccgttctcacagagctcccactccagagagaacaaagacctgccagcaccaagtggtcagctgtgagagcctggggtggtgtgcagggagggcttcctggaggagtgagccagggtaaaagactccagattgcatccccatggcccatcttccccttccttagcaaccttatgtcttcgttccctcatacatgctgtgttcctggctccttgtgagagacaatgctgggccacaggagaagccaattcagccccaatcttccctggtgggagctcagagccttgtgaaggggagatgggcaacaaaaacaagggagggaaactgactagtctcagaatctcgggtagggcatcagaacgtgagaaggaaccaaggttggtggctaaaagggaccctagaatgcgccagagaggaggtggcagggcctttagtctggaaagtccccttcccttcatgtccatatgctgggctacagcgccctctgctggcctctcctggtaatgcctaggaatctgggttggtaaatagggacctccttggctttcttccacaactccagacctcaagggaatgcaaatggggaagctcttcctctgttctcagccagtttttctcacacgtctcatctccagtcccttgatgcccactcccttcagaataaaggaggtcaagccacttactatggcttatgaggccctgcatggcctagcacctggtaacatcgctggcgccctctctttctgctccccctttgaatatcaaatcagtgtttattttgttctgaggagccataagtcctttttggaacccacaaatgatgccatgaaccactgcattggagaatacagaggtacatggaattttgcataaaaattcatgaggttctcaaaacctccacagcccaatcatggctttcaagttagagctcctttcctatgccctgaccgtagtgaagtgcttgcagcaaccagaaccgtccgtacgtgccatcctcctcaagactcttccctaccttcctcttaacccagctcctactcgttcttcaggtcttagcttgagggtaccctcccagaaagaaggcttccttgaccctccagcctggggtggacagctccctcagccctctggatccatcaaagccctggccactgagtgacatgtctgtctactctgctggtaacacctaaatagagccccacccatcccatagggaaataaggaccagagttgtcttgtttcacacctgtagatttcctccaggtcctgggaacacaaaatgggaagttctatctcactatccatctcatgccagccagagacagggtatgatgacggaagtaagccaggctggtggctcacgcgcgtaatcccagcattttgagaggctgaagcgggaggattgcttgaggccaggagttggggactagcctgggcaacaaagtgggacccctggctctacaaaaaaattttaaaaattagccgggcgcggttgtgcgcgcctgtagtcccaagtactccaaaggctgaggcaggaggatcacttgagcacaggaatgtgaggttacttgaactgtgatcgcgccactgcattcgtctaggcgacaaagcgagaccctgtctcaaaaaaaaaaaaaaaaaaaagagtcaaggcttagtaatattcctgaattcctgaaggagttaagaaaggaaaaggacaagcgggggtctaaacgagagcacgaaccctcagcgtatgacggctccaggctccgggggaaagtcctttagccatccatcccaaaattaagcacgctgggagctggagtcacagcagtgataaaacgaacaatgattctggttcctactgactgacaggagaggtttaagggtctctcactctccggggagcccctttccttcctggctgcggagggcggagcccgagagaggcacgcatgcgcaatgcaacgtctgccttaggcccggaacttcggtgcctgggcgcagcggtgcacccggacccggaacattctcaggcgaaagtgtctcttgcgtgcgtgggccggaggttagtgtgcggggcccgccgggcggttgaaaagtccgagagaatcaggatggaggccgtggcgacggcgacggcggcgaaggaacccgataagggtgagatcttggtcacgcgcaggcggcgggtgggtgcggttgcggtgtctctaggaaatgattcccccaggaacgcgaagtaggactcgttttagggggacacccacccccctcagctttaccggtcctcttcactactttgcccagattattccctcccttgtcgcgggctgaccttcttttcctccattccttccccccgaaattaacctcttcccagttccagaccaatcctttccatgtccctaattcatttccttaccaggctaactctcaaattaacagaaacctctctaccccggcctaattcctgcattgcctcagaccagcccttctcaaattacctccttccctgtaccaagctgagccttcccttgctctctagacgaatcctcctacctttccaggctaaacttctacctgcctcatgcaaacttatcccaatctaacgattccttcatttcattgtaactcccgtttcccccaaagtccgaaatccagccaggctcctttcaaagtccttactcaatttctgtgctttcccacaaccttcaaagtaatccgacgtcgggtgaggtgtgattggaagcgtggctccaacaccactggccaagaattggtaattgtggaagccagatggagatgattggtatatggaggtagggggagaattgtcgttgtactttctacttttgtgtatgtttgaaattttctaaaaataaaaaatttaacctaaaaaaagtcttaaggccgggtgcagtggctcccgcttgtaatcccaacactttgggaggccaaggcaggagagttgcttgagcccaagagtttgagaccagcctgggcaagagagagaaacctgatctctataaacatttaaaaattagccaggcctggtggctagggagtagctaggacaagctactcaggagactaaggtgggagtgtcactcgaatcctttgagattgcagtgacctaagattattacaccactgcactccagcctctgcagcagagtgagacttgagcccaggagtttgagaccagcactggcaacatagccagaccccatctctacaaaaaatttaaaaattaaggccgggcccggtggcttacacctgtaatcgcagcactttggaaggcggaggcaggaagatcacctcaggtcaggagttggagaccagcctagccaacatagcgaaaccccatctctactaaaaatacaaatattagccaggcgtcgtggtatgtgcctgtaatcccagctactcgggaggctgaggcaccaactggaatcacttgaacccgggaggcggaggttgcagtgagcagagatcgcaccactgtactccagtctgggtaacagagcaaaactctgtctcaaaaaaaaaaaaattagccaggtttgatggtgcattcctgtggtcccggctactcaggagtctgaggcgggaggatcacttgagcccaggaggtcaaagctgcagtgagctgtgtttgcactattgcattgcagtctgagcaacagagcaagaccctgtttcaaaaaaaagaaaaaaaatttgtctcttggccccatctgtctccttcagagagtcatgtatacttggtcttcatttcctcgtctcctgctcacgactgtctgacttttctcctaagaaactgctctgattagggtctgcactgacttcccccatgttgttcaattcagtccccccattcaggtttttgtttgtttgtttgttttttgagagagtctcactctgttgcccaggctggagtgcagtggcatgatctcagctcactgcaacctccacctcccaggttcaagtgattcccgtgcctcagcctcccaagtagctgggatcacaggtgcccgccactatgcctgtctaattttgtatatttttagtagagatggggtttcaccatgttggccaggctggcctcgaacttctgacctcaagagatcctcctgcctcagcctcccatagtgctgggattacaggtgtgagccaccacacttggcccattcaggttttttttcttactagactggactagaattaaatgctgttgatccttccatcctttttgcatgttttcctttggcttcagcgacaccacagtgcctgatttcctgcctgtctctcaggctgctccttctcagcctgactttgtttcccaggggtgctgtaacaaagtactacaaactgcatggcttcaaacaacagaactttattctctcatagttctcaaggccagaaggctgaagtcagtgttgctgaactgaaatccaggtgtctgcagggtcgtgcttccccacaggctctgggagaaaacccatttcttgcctcttccagccagtggtggtttctggaattccttggcatgtggctacatcactccaatctctgcttccccttttgacgttgccttctttttttttaagacggagtctcgctctgttgaccaggctggagtacgtgatctcggttcactgcaacctctgcctccggagttcaaacaattctcctacctcagcctcctgagtacctgggactacaggagtgcgccaccacacctggctaattttttgtatttttggtagagcgccatgttggccaagctggtcttgagctcctgacctgaagtgattctctcaccttggcctcccaaagtgctgggattacaggggtgagccattgcaaccggcctctttttttttaagataacagtaatgggctccagggattacgatgtagctatcttttgcacagccagtttttagcttcagaggcatgtcctccccgcatctgtgcagtgctttttcctggaccctcttgtcatccctctcccactcccctgtgccctccccagtccctacctctcatttctcttggctttggttcttgtcttgattctgatgacacccacagctctgtctccagcccaacatttctctcctgaggagtctggaggcccgtgtagcagcagtcggaccattcccctggatgcctcccttacttccagcacgtcagccctgtggctcctccactcagcctcctgacatctttctgattcgctcactcatgatcctgttccttcctccacagcccctgcccttgtccagctcagtcttcagctgcatcagtgatttaaatcctccctgatacacacaacacatgtatgtcacctgtgacttctttcctccccaacccagccacgctgcttaaagttgtctctatattctgttttcacgtatttcctgcttgccgcaggcttgctccctccactcttgggaaacaagtctcaccaaggtttgcccagcgctccgctttcctgttttctttccatttttttgagacagagtcttcactctgtcacccaggctggagtgcaatggctgatctcggctcactgcaacctctgcctcatgggttcaagcgattcttgtgcctctgcttcctgagtagcagggattacaggtgcccaccaccatgcccagctgatttttgtatttttaatagagagagggtttcaccatgttggccaggctggtcttgaatttgtggcctcaagtgatctgcccacctcggcctcccaaagtgctggattacaggcatgagccatggtgcccagccagctttcctgttttctttgcccatattattgttgatcctgactgtctcccacatcagactgggtgctccctgagggcaggagctggactggattcatcctatggatcctcagcattgcctgacttagggcctctcagagatttagtgtttttttttctttttttttttttagagttttgctcttgttgcccagactggagtgcaatggcacgatcttggctcaccgcaacctctgcctcccaggttcaagctattctcctgcctcagcctcccgagtagctgggattacaggcatgtgccacaatggctgattttgtatttttagtagagacggggtttctcccagttggtcaggctggtcttgaaatcccgacctcaggtgatccacctgccacagcctcccaaagtgctgggattacaggcgcaagccaccgcgcccggcctaagatttagagttattaaagagtggttgggtgaacgcatgaatgcatgagagagtgaatgaatgagtaaacaaattagcaaatgtattaacgatttaaagaattgagtggatcaataagtcaggcctcagggcctttgcagtagttgttgcctctgcctggaattctcttttccaagagacctcatggcttaatccctcaccacctgaggtctctaatcaaatgtcacttttttggcaaagccttctctgagccttccatttaaaattgcagccttggccaggcatggtggtttacactgtaatctcagcactttggaagcctgaggcaggaggatcacttgaggccaggagttcaagaccagcctgggcaacacagcaagaccctgtctctaccaaaaaaaattaaaattaggccgggtccagtggtgcacgcctgtaattccagcactttggaagatcgaggtgggaggattgcctgagctcaagagattgagaccaccctgggcaacctagtgagaccttgtctttactgaaactttttttttttttttttaatttaaagattggcagggtgcaggccaggcgcagtggctcacgcctgtaatcccagcactttgggaggccgaggcgggtggatcacgaggtcaggagttcgagaccagcacagccaagatggtgaaaccctgtctgtactaaaaatacaaaaattagccgggcatggtggcaggtacctgtaatcccagctgctcgggaggctgaggcagagaattgcttgaacctgaggcggaggttgcagtgaatcaagattgctccactgcactccagcctgggcgaaagagcgagactccgtctcaaaaaaaaaaaaaaaaaaaaaaagattggcagggtgcagtggcacacacctgtaatcccagcactttgggaggccgaaggggagtggatcacctgaggtcaggagttggagaccagcctagccaacatagcgaaaccctgtctctactaaaaatacaaaaattaaccaggcatttggcttgtacctgtaatcccagctagttgggaggctgaggcaccaaccacaataacttgaacccaggaggcggcagttgcagtgggcagatctcacgccattgcactccagcctgggcaacaagagcaaaactccatctcaaaaaaaaaaaagaaaaaaaaatttaaagattaactgagtatggttgtgcatgcctgtagtcctggctgctcaggaggctgaggtgggaggattgcttgagcccaggagttcagggttacagtgaaccatggttgtgccattgcactccagcctggcaatggagcaaggccttatctcttaaaaaataaaaataaaaataggccagtcacagtggcttacacctttaatgcccagcactttgggaggccaaggcaggaggattgctggagccctggagttcgagaccagcctgagtaacatgtcaataccctgtctctacaaaaaatttaaaaattacacaggcatggtggtatatgcctgtggtcctagctacacgggaggctgagatgggaggatcgctcaagcccaggcggtcaaggctgcagtgagctgtgattgcgccctgcactccagcctgggtgaccgagcaagaccctgtctcgaaaataaaataaaattgcagcctcctccacctcttccctcctccttccctgtttatttttccgcataactccaggaaacacctaacacattatgttttcggtaattatgttgctaattgtttgtgtcccctactgaaatgtcaacttttgctcactgtggtttctctagtgcccagaacagtgcccagaatatagtcagtgcccagtaaatgtgagctgagtgagtgactaagcccccagtcccttcccacactcccatctctgaactaaccaatctctcctttcctcaggctgcatagagcctggacctgggcactggggtgagctgagccggacaccagtcccatctaaaccccaggacaaagtggaagcagctgaggcaacaccagtggccctggacagtgacacctccggggctgaaaatgcagcagtgagtgctatgctgcacgctgtagccgccagccgcctgcctgtttgcagccagcagcagggtgaacccgacttgacagagcatgagaaagtggccatcctggcccagctgtaccacgagaagccactggtgttcctggagcgcttccgcacaggcctccgtgaggagcatctggcctgctttggccacgtgcgtggcgaccaccgtgcagacttctactgtgctgaggtggcccggcagggcactgcccggccccgcaccctgcgtacccgcctgcgtaaccggcgctatgctgccctgcgagagctgatccaaggtgtgggggccagatgggcgacagtgggcacatatggggagggaggggagactgaggcagagggaattagagaaaagaatacaagagcagagacagagatcctgggagagaagttctgagacagagacagggacacaggaagagactgagacagaaatgtaaagtaagggggagagatagacaggggtccagggaagagaatgggacagacaatgagaatagatcagaatttagtagatgttagaagtggcatttcagattggtaggctgaggacacagtacacagtgctgtgataattggtcatacctaaggaacaaaacatgagatccctacctcataccatatacagaggcatcaggggaaaccaaaaggagtatgtacatgaccttggggacacagaagccttctgaacaagacacacggtgaaaaccatgaaggaaaaaaaagatagctttttgaccatgacataattaaaagcatccttgtgaccacaacaccagaaccaaagttaaaagatgagagtgaatgaagcagagtgagttaagttgccgttagggagaaggcacaagttatagagaggttcacagagaaagagagagaggctgggcatgatggcttatgcctgtaatcccagcactttgggaggtcaaggtgggtagattacttgagctcatgagttcaagaccagcctgggcaacatggcgaaatgctgtctctacaaaaaatacaaaaattagctgggtgtggtggcgccctagctactcagaaggctgaggtgggagaattgcttgagcctgggaggtggaagttgtgtgagctgagatcccaccactaagctctagcctgggcgataaagccagatcttgtctcaaaaaaaaaaaaaaaaaacacagatgtggaaatgaggatgaaaacagaaggaagatgggccgggcacagtcactcaagccggtgatcccagcactttgggagggcgaggtgggggtggacctgaggtcaggagttccagagcagcctggccaacatggtgaaaccccatctctactaaaaatacaaaaaaattagccacatgtggtggcaggcaactgtaatctcagttacttgggaggctgagggaggagaattacatgaatctgggaggtggaggttgccaaaaaaaaaaaaaaaagaagaaagatgaatgaggtgggggtaggtgacagaaactgaaaaaagcaggaaagatagaaagatggagataaaggaagagatggagagagatccagagccggggtgggtgataatccaagttggggagaaggagggatagaaactgaatctgctagaggctgggcacagtggctcagacctgtaatcccagcactttgggaggccgaggcaggcaaatcacttgagataaggagttcaagaccagcctggccaacatggtgaaaccccggctctactaaaaatacaaaaaaaattagccaggcactgtggcaggtgcctataatcccagctactcaggaggctgaggcaggagaatcacttgaacccgggaggcggaggttgcagttagagttaatcgagatcacaccactacactccagcctgggcaacagagcgagactccatctcaaaaaactgagtctgctagaggatgccacaaacagctgggggtaagattgctggcaggagtggggaagctgagcaggacagggacagtcacagcctatggtgctgcagaggccaggagtccgagcagtttctttgccctggactctgaagacacggctaggaccagtggaggggagggaccagggcaggtttaactgttatttgagggacagagtcactcgtgcagaaacaggcagccaggggtgatgcagggaactcaagttttggggtagtggggaagccaggcccacctgaggggttgctgcatagaggagcactcgagagaggatggatctagggccttccaccaccaggaggctttcccagggatacacgggcagatgccccacctgacctgatcccttgcacacacatgccaaatccacgtggatgtacacacatacacgccccacagtgaaggcgtgtccactgccagccagactagggccccacaaacaggcacacaacctagagacacacaacttctgctgcattgtcctgcatgctgacacccagacagacaggtgtctgtgggcatatgctgggcctcacaggacatgtgtgtgtacataggccatgtacacgtccatgggcaggagcttgtgcatcgtgcctggacacagttgtacacgagctccagaccgtcagagcctcagaggccaggatgtagccaggtctgcccatgcacacacatgcttggatgcatgaatacatgaatacacaggaagatagaggccgggccacatacacacactcaggtgcctgcacgagtaatcacatgcacatgacctcaggtgcctgcatgagtgcttgcgcacacagcttcaggcacctgcatgagtattcacgtgcatgcctcaggcgcctgcattattcacacgcacgcctcaggcgcctgcatgagtactcacgcgcacctcaggtgcctgcatgttttcctgtgtttttgaatgtgtgcatacacacacttggactgtgtatgcacatcatcccacaagcatgatcacacacatacccacatggacactatctgctcagtcgctcaccccatgcccaccctgtctctcctctgtgcagggggcgagtacttcagtgatgagcagatgcggttccgggcccccctgctatatgagcagtacatcgggcagtatctcacccaggaggagctcagtgcccgcaccccaacccaccagccccccaagcccgggtcccccgggagacctgcttgcccgctctccaacttgctgctccagtcctacgaggagcgggagctacagcagcgtctgctccaacagcaggaggaggaggaggcctgcttggaggaagaggaagaggaggaggacagtgacgaggaaggtgagggccagtagcaggaagaccccagattccagacaccccagccctaggcctgtctgtctccacttcatggcagcaggctgggcccccaacctgcaaaagccgacattgcgtccctcccctgcccagcctgactctctgtgtatgcccttccaaccgctgcagcatccccatcccccactctgaggcaccaaatgaaccctcgcctccaggtctggacaggctgttccctccgccaggaatgcctctcctcccacccttcaggtctcagatcctgacccgaggatacagtctccagagcactatatggtcatgtgttttatgcgtgtccctggagggcagggaccagggccatctctgtcactagtgtgttcccagagccacccagcgcaaggctgggcacaggagcagcagctctctgtggactctgtgctcagtgcctgcccgagtgcacccgcattcacaccccctctcctctccctctgcagaccagaggtcaggcaaggactcggaggcctgggttcccgactcggaggagaggctgatcctgcgagaggagttcaccagccgcatgcaccagcgcttcctagatggcaaggacggggactttgactacaggtgctcctgtgcctccacctccccatcccccagcccagcatcccacggcctttggtcacatgcagagcccttaacaagctgtgggggtctccctttgtggagctacaaggccccaaaacagttccaggatgtggggttgaacagccaaaggaagaggctgggtgacctcggactagccttgtccatctcagaccctcagtctcctcacctctaaggcaggggatggacagggatgacatatagctcagtatcaatgaaaccctgaaacacttccctcctggcaatggcagaggctactaccccaagccccccaagtctccctaggaagcccaacctcttccgcttcaccttggacctcctcatgctgcaggaagtaacccctggcaaagttcatgcccggcatggaggggcctgcactggctgcccccacagttacagttgttcatttctccagtagcaccccagggctgagacacgtgggccacctgctttggaaaaggacccaggagagtgatgtgtcagtcaaagattggttttgtcatttaaggtagctttgccttgtggtcccaaacactgggcccagcagcagaggaccctccttggtttcacatccagccccgatgacatgtgaaatgtgtgaccacacataagcggaccctacgtccgtcctgaggtgggctcatcaggaaagtgggaattgtgattgcccctgccgtggggcccagccatggtcaccagagcctcctcccattctgggatccctggctcttgaatggaatctggctgctccacttccagccaggcaggcctgctcagagccccagttcctgcacgcaaagtggtgagcagagggcctggaccatggggaccctcattcagcaggcatcactgctgttcccaagccagggcccaggaggaaattgggggtggcagggaccacagtgtgttgcctcgggagggcagcagtggccccgacgtgtcccccatccgtgcattcagttggcatgtgctgagcatctgtgatgtccacaggctctggggataaggcggggaccaaaaccaacgaaaggcttccctgcctgaaaaggggtcccactctagtgaggaagatctagaattttctagcacttcatggtgatggggccatgaggaaaagtgaagcagtgggaggggagtgacagggtggctagggaaggcctctctgaggggctgacagcaaaggcctgcaggaagtgggaggagcattcctggcagaggccatagtaggtgccagagcccccagcagcaccaaggggcagaaggggctggagcagtcgcaaggggtcgcaagggggtaggagatctctgagtggccaaatcaagctaggcttggcaacccaagtgcgtgctgctgggtttacttgctgccttagggcatgggcagctgtcctgcctgtggtcagctctggctaatcccggcctctatccactggagggcagtagcaagcccccagtgatgacgtcaaaatgtcaaaatgccgtgggggcaaaattacccccaagtggttctttgttgagagccactgcctgcttgagaatgtaagcccatgtgtcgccacattttacagctttttaagaaaaactagagctttggggttttttttagacagggtctcctttgtcacccaggctggaatgtggtggtttgatcatagctcaccgcagccttgacctcctggcctgaagtgagcctcccgcctcagccaactgagtaagctgggactacaggtgctcaccaccacgcctggctactttttcaatttttttgtagagacagggtctccctttgttgcccagggctccaactgctgggctcaagccatcttcctgccttggcctcccatagtgctgggattgcaggcatgagccaccatgcccagcccagagtttttgtgcaaactctgatttggaaaatgttcccttgagttttaaaccctgagagttttaaacactatctcccttgggagggtcagctctgacggctgccagcacatggcctttgacatcagggtgccccaggcctttgacctgggcatccgagggtcccagggagacccagtccttgacagcctcctcctcctgcagcacagtagacgacaaccccgacttcgacaacctcgacatcgtggcacgggatgaggaggagaggtactttgatgaggaagaacctgaggatgcgcccagcccagagctggatggggactgatggccgccacccttcccaccgcctgccccatccccatccccaacaaggcagctgattccaggcctgctcagtgaccctttctctagggggacatcagggcagtgccccacaacccacacacaccaccatctcactgggtctagtctcatctcagacaacccccacccccactgtttctggggttccctttctcatctctcccaccctgtctcctgcctctgtctttcttggtgtctgtctgggcttctttctgtctctttctgtctttctgtctctctccctacccccgctccctctttccagtgctctggctggctgtctctccctttctccccctctctctctgccttaggctctgtctccaccgcagggcccaaggtgaaagtcctccccttgccggaggccagctggcagggcctttcgtggctggaagtggccagtttggttccggtgctgacccctaggccccagcgcagctgcctcccgtgctgtctgtctccccctctctgtttatgtctgcgctgtgtctcacactcagagcctccttgcttctgttaggttcccatctctccttctgcctcactctgggcctcttctttctacttgtacatttccacctctctaggcctctgctctcactgtccctctctgtctgtctctcagcctttatctctgggttttgatcccccactccaggctctgggccccttcttcccccttccctcaaacctggctgctataggcagcagaaccctgaccactgagtaatacagccccaggggagggaggagaccccaggcagggaggatgggggcagctctcttctctccccaggacccaggctgtggatcacggggcctgccagcttgagtgtagagggaggggggactctacccttctcagccccaccagcccccctctgcccaaccacaattttcccttcctccgccttcctctccctctcctgtttacactccccaaatgcgcacaggctgttatcatgggtcctgagtcatcccacacacagcctgccccagcgtccctgcccccagctggccgcagggcccgccccatggagccccctgccgccctgggctaatgggagccagatggccgcctggtgactcagccaccgggcctgtgggaacccaggcgtcccgccttcccatgcccccacacccggctcctgctcccccagcagacacacacaggagggcctggccactgttgagggggcacacagggcaagggtcaccaagtcggggcctagggactcctcatgcctctgagatggaatggtggtatcctgccgtggccaagcctgaaggaccctcaaaactgcctcctggagtccacggttcctgacctccgagcctcagctatgccctctgggtcaaccagaattagagccagacagggaaagtgagagctggatggaggcagacaagatgctcagagcgactattaaagaacgaaagcctctgctacggagcgcttctgtcctctgtcaggcccgagcgaagtgcctgacaccgggttggatcctcagatggccccatgaactagtgaagtgggtcaaaggaggcctggaaagatgttgcttcctcaaggccactcggccatcagaggcagaaatgaaacaggaacccaggcctagaatcacaaaggtcctagaaaccacttggctgtctggcctctcaggtgtcagggccatccagagtgagacagcattggagggacaagtgtgcatgcagatgtcctcagacgggaaggtttgagaagggtcagatggtaggcgggcctaacaagggctccgtgctagccactgtcccgcacacagacaggatcaggtcatcttgatatggagatcagtccccaaatcactgaattgtcccagcagtgctatgccctaggtactaccaatatcactcctctatttcccagaggaggaagcagcagctagactccaggaccttggggtcatatctctcagaaagccaagagtgcaggatgagagctgtctgtctcttacctgcctgtatttgtgccccatttttaaagagcagagggcctgggccacaggaaaggtatcagcccttggtgataggcacattttttaccagtctatcatttggtcattaaatttgtttacaatatactttgctatacgtaaatttgttgtgtaggtttttaaaaagcgatgagagacacagaaattgagtcagaattagggttagtcagatggtcaagacgtgagcatctagctgacagacagaggtggagccagtcccagggacagggattagatggggagacaggaagagaggtggagacagagtggggtagggatgacgggagacacaccccctggtcactgcctctgagacctgggggtggtgggccccagggcgggtgcctcccatccccctcccagttctcccggggtcggggtaggtggaaaggctgagtcagggagggcgggccccgctgggagacaacccctaggtgggcatccggcccccacccccgtgtctcctgtccgtcctggccctggcctggctcgctggcctggccgccaccccgccccccacgtctgacacctccatgcgtcctgccaaagcaagctgcctccctgcactcttccccctccagctccagtcactctgtccctctgtcccccgtcccttctccctgcttctgtgcgtttctttccagccctctgccttcctccctcaccgccactgctctgtcttctcgttctgtctccacacctctggctgtcggtgtctccccgtgactttccgtctcccctctctctcctcccttgtttttcccatgcctctccctccctccctccctccctctcctccccaccttttccactccgtgtccccagccattctccatctctgttctcagctcctgtcacctcgtttccccatccctttctctgctggagtctccctctggggggctctgtcctctcctcactttgccctttccctctcgctgctgtgtgtcttggcccgccccccgtgccccccatctcctctgtctcccacactctgggaagcccggctgggatatccaggttggagcctcactggcggccactggaaacccagaatgaggggtcatcgcctctcgcccacccagaaagggcgcaggagggggcagcaaggttgcggggcctgtctggccagaaggaaatgtctgtgctgtggcctggtcacccccgcccccaggacctgctgggctgctgccgcccccggccggggctgaggccgagtaaacacagcaaacacagccgccggcagcctgggatatttataccgaggctgggcgtgggtccagtgcccaccacagcccctgccctgccctgccttgcctgctgccacagccagctccgagccagcgtggcaccagccggcaaggggacgcgccgcagacacagcctgcgctgggtatggaggccaacaggcactggccgctcatgatgcaggcggctccatggacgcaccctgtccccctcccctgaaaacaccagcacacaatgtggacccacactcgcagctgctcacaaacacacatccacccctgctgagaacgcgaaatcccctcaacgatgatgcaaaacagacccacacaactccacacactgcagtcaccagcctacatgtgggaacacagcatgcagacaccaccttagcacctgctcacagcacccacaggctgggaacaccagtccctgagatggacacacagccccgaagtacagccctccctcacacagacaaacactgagaaccacaggaagcatgctggatgcacaccacgtagacaaacatgctcagaataccagcgacacatgcactgatcacagtgcaacccagaaacaactcaactcatctgcctcatatgtaagaaacacacacggccgggcgcggtggctcatgcctgtgtctcagcactttgggagaccaaggtgggtggattacaaggtcaggagttcgagaccagcctggccaacatggtgaaatcccatctctactaaaaatacaaaaattagacgggtgtggtggtgggtgcctgtaatcccatctactcgggaggctgaggcaggagaatcgcttgagcctgggaggcggagcttgcagtgagacaagatcgcgccattgcactccagcccaggcgacagagcaagaccccgtcttacacatatacacacacactcactcccctctcctggagaaacaccattcccacagatgattaacatatgcagaaaacaccacatttcaagtcaaacttacacttaaaaatgcacaaatttacactcagaagaacagtgaagatgttgagaaaaatatcagacacacaatatgccccagatacatggccgacttgcagaatcaaacagtgccagagcataaaacccacagaaaatacaacagcttgcccagcagaaatacaaaatgcagacgcacaccccagaaatgcagcgcagccacaaacacacggagctaacacgtgctggggacacacatagacaagaccatccataccaaacagcacacaggcccccagaacacccatgccagacgcagctcacgccacaaagcttggaatcacgcacacaataagttcctgaacacacaaatccgaatccacactggaacctcaaatactctgcatgtccagagactaagggggaaggggctttctctcacccaccaatctccccactcccccttgctgacccgggtcccaggcccgtcttgggggcgggggagggggcaggaaggcctgagctggcctcccccagcagcttcctgccccacgggggctggacaggaagctggggctccagccggaacccaggctccccccacgacttccctctgtggccccgggccgcctgcagaggcaggggcggggcagggggaggaagcggggagccccaaaccccctgccctgcccctgcggtcggccacaggcgggggcagacttgtcccgacggggctgagccacccatcgggcctgggtgccagggtggcagggcaggggcagtgcgcacgcggccagaggaaggtgctgagcccacagtttcccctccccgccctgtggggctgtgccagctcagccggcagccctgggcaggtgggcggggtgtgtcatgagggcgtgttgggcaggccgaccacaccgcgaatgtgcagccagcacttgtcctcaggccgaggcacgagctggggctgggcatgtgagggccgcgtctgccaccctgggggtgtgtctgctccgtctgggaccctgggtgtgacagtgtgtctgggcgtgacgtgacggggtcgctgcaatctgtggggccctgtgggactccccaggctggaattgtgcgtgtgtggcggagggtgtgggatgtcagactgagtgggtaagaccgacctgctgtctgtgaggttgtgacgtgtcagacctctgtgtggggtgtgtctggtgggactgtgacaggtccgactgtggacatgcaccctggacctgtttgtgactgtgaacccatggaggaggaggtggctgttgagggatccatttcctgtccgggctctgatgccgtgatgcgtgtgcgtgcatgacactgtttgaatcagtgtctggtgtgcggtggttgcgaccatgaccctgtggaatatatttgtatatgactgtgttgtgccaggtccctattgaagtctctgctcgtgttgtgtcccagtgaggctccgaggctgggtggtgtttacgtgatgggctgacactttctctatttgtatctgtgtatatgtgggctgcagctgctgccaaatgacacagcccatgtgttacgggccctgcaggaatctctgtgtgtccacggcggctctgagaggtgaatatttgtgtagtgtggggcaccgtccgtgtttcccgccgtgtgagtgtgtctgcatgtgtacacgcaccacatcctcatagggctgcagcgattacagccgagtcactgtgtcctagcttgtgactctgcctcttggggccagacctcagcatctctatacctatccatttgttggcatgtccttgcatagtgaactcctgcctccccactcctccctcagccctgtgtgctttgggacctgaggccagaggagtaaccacatttctacccctatgctgagctgggagggccccaggtccctggcacccagacccagtgctgccaacagctctcatgcccacaggcaaaggaaccgcagcactcatactgtccttcctcccaggacaatcactgggtgtggggaagtgaaacctaggagaaagagcagaaactgagaggcaggagaaagaggaagcaggagagaattcacaagcaggaccatagcagatgggaagaaatggagacagcagagggagacccacctgtggctgctgccatttcttgcctggacagctggtctgtctgtgctcaccctcaccctgacacttctgtccactcccaaccatgagcaagacggcggaccctctgagcgcctaggtcaaaccctgccatggctcctgtcttccttgagtgcaagttctttttttttttttttttgagatggagtctcactctgttgcccaggctggagtgcagtggtgcgactttagctcactgcaacctctgcctcccctgttcatgcgattctcctgcctcaggcccctgagtagctgggatacaggtgtgcaccacaatgccagactaatttttttttgtattttttatttttatttatttatttgagatggagtctcactctgtctcccaggctggagtgaagtggcgtgatctcggctcactgcaacctccacctcccaggttcaagcgattctcctgcctcagcctcctgagtagctgagattacaggcgtgcgccaccatggctaatttttgtatttttagtagagactgggtttcaccatgttggtcaggctggtctcaaactcctgacctcgtgatctgcccgccttggcctcccaaagtgctgggattacaggcgtgagccactgcgcccagcctttttttgtattttagtagagacagggtttcaccatgtggtccaggctggtctcaaactcctgacctcaagtgatccccctgcctcagcctcccaaagtgctgggattgcaggtgtgagccaccgtgcccagtctttttttttttttttttttaaagatgcagtcttggctgggtgcgctggctcatgcttgtaatctcagcattttgggaggccgaggcgggcggatcacctcaggtcagaagttcgagaccagcctgaacaacatggtgaaacttcgtctctactaaaaaaaaatacaaaattagccgagcatggtggcgcatgcctgtaatcccagctacccagctacttgggaggctgaggcaggagaatcgcttaaacccgggaggcagaggttgtggtgagccaagatctcgacattgcactccagcctgggcaacaagagtgaaaatccgtctcaaaaaaaaaacataaaaaaaagatggagtcttgctttgtcacccaggctggcatacagtggcacagtcagggctcactgcagccttgacctcccaggatcaagtgatcctcccaccttagcctccagagtagctgggaccacaggtgtacattttttaaaagtgttttgtagagatagggtctcactatgttacccaggctggtctcaaatgcctggattcaagtaatcctcccatctctgcctcccaaaagtgctaggattacaggcgtgagccaccccgcctggcctgaactactatcttttattgtcttcttcactatcccccactaaagcaggttcctggtgggcaggaactcctcccttaacctctctgggcttgtttcctcacctttaaaatgggtgttatcagagtccctgcatctcagagtgttgctatggtgactgaatgagttcattaatgtaaggcacttcaacagtgcccaaggtgctcaataaatagatctaactacagtagtgttccccactggtcccctgtgccttgatgccgggcaaaggaatagtgcagacaggcaggaggaggcagagagggagagagagggagtgggagtgggggaacgtcagggatggagaccccaggcaggcgcccaatgacacagagatccgcagtcctctctccatctttaatggggccccaggtgggcttggggcacgggtgtccttaaatacagcccccatgggcaaggcagcgggggcggggcggggtggggccgggcctgccggggcggggcggggcggggcgggacctcagctgcacttgcaggagcgcacgatcatgttggacagctgctccaccttgggcttgcggcccacgtagtacacgatgggcagcggctccagcgcctgcggcacgcagcacggcgccgccgaggcgcccgggttatgctggttgtacagggccaggacctgcgggcggcgggcggggtcagggctcagggctcgtggagggaggaaaacggccctccactgccccatcccccacccgctaccgcgccagcctctctcacttcgtctctccccgcatcccctcttcccatctccaattcggtctctcttatcttctaacatcctatcttattctgtctctccccacctgtctgattttctttttgttttgagactgggtctcgctctgccacccaggctggagtatagtggcacgatcatggctcgctgcagcctcaacctcctgagcgcaagccatcctcccgcctcagcctccggagtagctccaaccacaggcaagcgccaccactcctagctttttttttttttttttttttttttttggtagagatgggatctcagtctgctgcctgggctactctcgaactcctgggctcaagcgatcctcctgcttcagcgtcccaaagtgttggtattaccatcgtgagccgccgcgcccgcctgattttctttctcagtctctgtccctcctcatcttcgcctcttgccttgttgtgtatctgtctttgtctctccttggcctaactctgtgtctgtatctgtctctctcattttgtctctccatttctgcgtttttccttccatctccctgtctctcttctccccttcacccccatccctctgttacttcactctgtgggtcttcatagctcatctccctctggcccctgctcagagcccctctctagcttcctgcctctctccccatctctttattcattcccctccccaccccatccctctctttctccccatcctgccaactcacctctctgactttacttctctttctctctcctcttcctccgtcctggctccccccaagcgcatctcgtagcccggtgggccagacgtaccttgctgtactgcgtgtccaggctccaaatgtaggggcagggcccgaggcagaagttggcatggtagcccttgggctcgtggatccacttccagccgaggtccttgcggaagtcaatgtacagctgccgcacgcagcagttcttctccgtggagctgcaggcaggagagacgcgtcaggggcagggaggggctaccaccatagaagccacatgcccctcctccccaggtgcgtgtgtcaccctaggttgcccccccagccctatctccatctgggtctcccttgcacccactgtgttaataacaacacaaatagtcatgataatcactaacacagattaagcacttcctccagtgctaagagcaatgtaataattaatttcacgcaatgcttaagacaagcctgtaagaagccagatgaccatccacgggggggctaaataaatcatggcatgccacaccctggaacatacaaaataacacagctccatgtaaactgatctgctctatttgtgcaacaaatgtttattgaactactactgtgtgctgggctgggatctactgtggactgaggacaaatgaaacagatagaaataggctaggcatggtggctcacacctttaatcccagcactttgggaggatgaagtgggaggatcgctggagtcgaggagttcgaggttgcagtgaactatgataacaccactgcatgccagcctggacaacaaagtgcaagaccctgtctctacaaaattttttttcaatttttttaaaaaagagacagaaatctctgccctccatgggcatgctataaattgtcttgtcactcctctgctctgaacctggctccatctcacggcaaatgcccaagtcctcaccgtgagccacaaggtgctatcaaatctggctgatctcaactccctctctcacgcctactccactccagccacactggcgtcctgtctgttcctcagacagtcttatttcggggctcctgcatctgctgttccctctgcctgccttgctagtcccacagatacccactccagcttgttccttcacttcatttcttctttttttttctatttttttttttttttttttttgagacagagtctcactctgtctgccaggctggagtgcagtggcatgatctcggctcactgcaacctccgcctcccaggttcaagcgattctcctgcctcagccttccgagtagctgggattacaggcgtgtgccaccatgcccggctaatttttttgtctttttagtagagacagggtttcaccatgttggccaggctggtctcgaactcctgaccttgtgatccgcccacctcagcctcccaaagtgctggtattacagacctgagccactgcatctggcctatttattctttttaatttgttattctttttagagacacggtctcactatgttgctgaggctggtgtcgaacttgggctcaaacgatccgcacgcctcggcctcccaaagcattgggattactggcatgagccaccacacctggccccttcacttcatttaaaccttagctcaaatgtccttcactcagggacccttaactcctaaagcagtgtctggaatgcagtaggtactagtaaatatcagttacatgactgaacatcacctcctcagagatacctttctgagccatcctttccaaaatatccaagtgactgttagttccatttagtgcaatacggtattgcagttatgcaagaaaatataaaaatgtctgcatttgaaatggggcaaaatcttaattaccgatgacgctggatgagagtttacgggcattcattatcttcattgcttttgtatacatttgaaattttccataataaaggaatttaaatcagaataggaaaaataacagttcccaatatctattactctctgcctgccttcttctggtttattttacttcttagaactgtcaaagaggccgggtgcagtggctcacgcctgtaatcccagcactttgggaggccaaggcgggtggatcacctgagatcaggagattgagaccagcctgaccaacatggcgaaaccccgtctctactaaaaatacaaaaattagctgggtgtggcggtgcttgtctgtaatcccagctactcaggaggctgaggcacaagaatctgcttgaacccaagaagcagaggttgcagtgagccaagatcgtgccactgcactccacccagggcaacagggtgagactctgtcttgaaaagaaaagaaaaaagaaagaaaagaaaagaaaaagttgacaatgccttttttttttttttttttttttgagacagagtcttgctccgtcacccaggctggagtgcagtggtgcaatcttggctcactgcaacctctgctcatagattggtggggccagccaggcacggtggctcacgcctgtcatcccggcactttgggaggctagggcaggcagacttgaggaccctgtctttactaaaaattcaaaaattagctggacctggtggcgggcacctgtaatcccagctactggggagtctgaggcaggagaatcgcttgaacccaacttcaagtggcaccggataacctagaggcaagataaagcctttccaagagccacagaagcctgagaaggaagtcaagaaactgagatccctgtgaactcagcccgtaccacccaatttggttggacctcagtttcctcatctgttcagaggtaggagctactagataaaataaggtgttaagctgagggccaaggggccatcatgggcaggcttagggagggccatgagtgcctgagatcatatgcacatgtgtgtatgtatgcatgtatttctgggaaaaagagtcctggctttcactttctcacaggaagttctgaactcacaaaaggggaagaactagtgtccggaatctttttttttttttgagatggagtttccctcctgttgcccaggctggagtgcgatggtgtgatctcagctcactgcaacctccgtctcccgggttcaagcaattctcctgcctcagcctctcaagtacctgggattacaggcatgtgccaccatgcctggctaattttttgtatttttagtagaggctgggtttcaccatgttggtcaggctggtctcaaactcctgacctcaggtgacccacccacctcggcctcccaaagtgctgggattacaggcatgagccaccgcacccggctcagaatcatctttaatatgcagttcaaccctagctggggttctgagatcctaggatttgaacaatctgtgatactgttatccaagtcagcagctctccacgtgagctcccaggaccagcggcagcatcacctgggaactatgggaaatgcagattctcaggtggcaccccaggccactgaaatcagaaattgtgtgcaggactgggaacaacagtccgtgttgaacaagccgtctaggtgatcctctgactcattttttcagcacacattcggggcctaccctgcaccgggccttgggatacccacagcccttgcccttgccaagcctcttccgtccagtctctcaagacctaggccaggtgcagtgactcacgcctgtaatctcagcactttgggaagccaagaccggtgaatcgcttgagcccaaggagtttaagaccagcctggggagcatagtgagaccctgtcgctacaaaactttttataaataaaagacccaacagagactgtttgttgagtcaaagatctacttagggccccaggggagcccagaggcctcacatccatcttggatgttggagaaaggggttaggaaggaggtagtgttcgagctgccttaagaacaaattttcctatgaaagttttttttttttttttttgagatggagtcttgctctgttgccccaggctggagtgcagtggtgcaatcttggctcactgcaacctccatgtcccaagttcaagcaattctcctggctcagcctcccaagtagctgggattacaggcacacaccaccatacccagctaatttttctgtatttttagtagagacagggtttcaccatgttggacaggctggtctcgaactcctgacctcatgtgatccacccgcctcagccttccaaagtgctgggattacaggtgtgagccaccgcgtccagctggaaagtttcagatgtacacaaaagcagcttcaacaatgaccaactcatggccaatttccattgcatctctacccctatccactatctcttttttttttttttttgagacaggatctcactctgtcacccaggctggagtgcagtggtgcaatcacagctcactgtggcctccagctcctggggctcaagccaacctcccacctcagcctcctgagtagctgggacaaaaggtacacaccaccaggcccagctacttttcatatttttttttttgggagatggggtttcaccatattgcccaggctggtctccaactcttaggctcaagcaatcctcctgccttggcctcccaaagtggtgggattatagctgtgagccactgcagccagccgacaatggtttatctcaaagcacatgcaatccaccgtgttgcttcatccataaatatttcaaatgtatctctaattaagactactttaaaacacagtcacaataccatgtaagaaaattaacaattccttgatatctagaggaatatctagacagagttcacatttacccaactgtctcataaatatcttttttttttaagcctgtgtaaataaggattcaagtaaggtctacacattgcaattggttgatatgtctcttaggatttttttttttttttaatttttgagatggagtctcactctgtcacccaggatgcagtgaagtggtgcaatctcgggtcactgcaacctgtgcctcccaggttcaagtgattctcctgcctcagtctcccaagtagctaagactacaggcgcctgccaccataccctgctaatttttgtatttttaattatttatttatttttttgagacgggagtctcactcttgttgcccaggctggagtgcaatggcgcgacctcggctcactgcaacctccacttcctgggttcaagcagttctcctgcctcagcctcaagagtagctgggattacagggcccgccaccacgcctggctcatttttgaatttttagtagagaggaggtttcaccacgttggccagactggtctcgaactcctgacctcaggtggtccacccaccttggcctcccaaagtgctgggattacaggtgtgagccacgacagctggcctgatttttgtatttttagtacagacagggtttcaccatgttggccaggctggtctccaactcctgacctcaagtgatccacctgcctcagcctcccaaagtgctgggattacgggtgtgagctaccatacctggcctctcttaggacttttttcaaaatctacaaaatcatctctctctctctctgtatatatattcagggtcaactatatatagactgacccttggacatgggtttgaactacatgggtcctcttacaaaattcaccacttacaggtgaatttttcttccacctctgccctgagacagcaagaccaacaccttttcttcctcctcctcagcctactcaacatgaagacctttatgataagccacttccactcaatgaatggaaaatatacttcctcttccttatgattttcttaaggacattttcttttctctatcttatttttaaaatgcaggcataggccgggagcagtggttcaagcctgtaaggccagcactttgggaggccgaggctgatggatcacctgaggtcaggagttcaagaccagcctggccaacatggtgaaaccccgtctctactaaaaatacaaaaattacccgggtgcgatggcggatgcctgaaatcacagctatttgggagactgaggcaggagaattgcttgaacctgggaggcggaggttgcagtgagctgagatcacttcactgcactccagcctgggtgacacagctagactctgtctcaaaaaaaaaaacaaagaatacggccgggtgcgtggctcacccctgcaatcccagcactttgggaggctgaggcgggtagatcacttgaggtcaggagttcaagaccagcctggccaacatggtgaaaccccacctctactaaaaatacaaaagttagccgggcatggtggcaggtgcctataatcccaactactcaggaggctgaagcaggagaattgcttgaacccccgggaggtggaggttgccgtgagctgagattgtgccattacactccagcctgagtgacaacagcgaaactccgtctcaaaaaaaaaaaaaggggatataggacataatacataaaacatgcaaaatatgtattattcggccgggagcagtggctcatgcctgtaatcctagcactttgggaggctgaggtgggcggattgcctgacctcaggagttcaagaccagcctgggcaatacggtgaaaccccatctctactaaaatacaaaaaattagctgggcgtggcggtgggcacctgtggtcccagctactcgggaggctgaagcaagagaatcacttgaacccgggaggcagaagctgcagtgagccgagaccgcaccactgcactccagcctgaatgacagagactctgtctccaaaaaaaaaaaaaagtattaatcaactgtttatgttgtggataaagcagaattccagtccacagtaggctattaatagttaagtttttggggagtcaaaacttgtatgtgaatttttggttgcatggggggtacgtgtgtgtgtgtgtgtgctttccccttctttgcattgtatttgatgaagaaactgggtgaggtttcttgcagtctgagttttgctgaccatttcctctgttcctgtctttctagaaaactgttaggatctacagtcctgatcagattcaggtttgatttttttttttttttcctgagacaaggtcctgctctgtcctgaaatgcagtggcgtgatcctggctgactgcagccacaacctcctaggctcaagcactcctgcctcagcctcccaagtagctgggactacaggcacacaccacccagccagctagtttttttgtatttcttgtacagaggcagggttttaacatgttgcacaagctggtcttgaactcctaagctcaagcgatctgcctgccttggcctcccaaagtgctgggattacaggcatgagccaccgcacctggccttcaggtttgattttttgccaagacttcctaggcaacattgggtccctccctacggaggctgacatggctggctatctccctttgtaatgtcaggagctgttggcactcaagacctcaatttgtggccgggcgcagtggttcatgcctgtaatcccagcactttgggaggccgaggcgggtggatcacgaggtcaggagttcgagaccagcctgaccaacatggtgaaacccagtgtctactaaaaaaaccaaaaattagccgggtgtggtggcacacgcctgtaatcccagctactcaggaggctgaggcaggagaatcacttgaacctgggaggcggaggttgcagtgagccgagatcacgccactgcactccagcctgggcaacagagcgagactctgtctcaaaaaagacctcaatttgttcattgacagcgttgctgggctgatggcgctaagatctggtggtgaaggagcctgggagcagggctgattttctggcagggaaacagccggtaacaaagcccagagacaggaccaaaatattttaagcaagggaggaataaggtcagatgatcactctaaatttacaacattctaactctccatttcaactttctaggaatccaacatttcagctttcttagattgcagtattagcattccagcatcttatgattctaacattctgacagcatcttcaactctctaggattccccctttccaacctttgaggatcttggcattcctgaattccagtatgccagtattgcatcccaacattccaaagttctgagccatcactcaagaggttcaaactgacactttctttcttttttttttttttttttttttttagatggagtctcgcatcattgcccaggccggagtgcagtggcgcgatctcggttcactgcaacctccacccccgaggttccagtgattctcctgccccagcctgggtacctggatagccgtaatcccagccgagtagctgggattacaggtgccagccaccacacctggctaatttttgtatttttaatagagatggggtttcaccatgttggccaggctggtcttgaactccagacctcagggatccgcccacctcagcctcccaaagtgctggaattataggcgtgagccaccgcgcccagcctgctgccactttctattaataaaatcccagcattctaatattctaacattccaacactgagttccaacatgctgagataccaatattctgctttctccaactccaacatttgtggatgtgaatatttcaaaacagaattctaccactgtgagcccaatattcaaggactccaatctgccaacactggtatccacaattggccagtggtgcaggaattccacatgggccatcttcccattttgaatccccaaattctaggattccaatgtttcagctttccttgagtccgacattttccatttcagtaattaacaccaaattctagcattctagaatcccagcattctagaacctcaacctgccaacaatttagggattcaagatggtgaccttccaactttgaattccaacaatcacagggttcaactttctaacattctgtgattccaacactccagcaagaaagcaaggctgggcgtggtggctcacacctgtaatcccagcacttcgggaggctgaggcaggcggatcacgaggtcaggagatcaagaccatcctggctaacatggtgaaacccagtctctactaaagatacaaaaaattaggccgggcgcgttggctcacgcctgtaatcccagcactttgggaggctgaggtgggtgtatcacgaggtcaggagatggagaccatcctggctaacacagtgaaaccccatctctactaaaaatacaaaaaaattagctgggcgtggtggcacgtgcctgtagtcctagctactcgggaggctgagacaggagaatcgtgtgaacccgggaggtggagcttgcagtgaatcaagatagcgccactgcactccagcccaggtgacagagcgagactctgtctcaaaaaaaaaaaaaaaaaaaaaaaaaggaacctgatcccaacattacaagactcccagttctttttttgttttttgtggctgggattataggcgcccaccacgcctggctaatttttggatttttagtagagacgggtttcaccatgttggccagacaggtctcaaactcctcacttcaggtgatccacctgcctcagcctcccaaagtgttgggattacaggcgtgagccaccgcacctggcacaagactcctggttcttacacccagacctcatcccctgagccctccaagctaaaggagacagatgctcagcccaagcacagcagcagccaggtgtccaacctggagcacctggtcagcagatggcagtcatgcccccagcctggaaggcctccatccaggctacaaggctcacctgaagcaatagttggtgtccagggctcggcggtgccgggagctttgcagatgctgggccctctccagcggggtggccatgagaagcaggaaaggccggttcatgccatgaatggtggccaggtcacctcggcggccggtagtgaaccctgctttggtgtgggagtcaggggataggggacatacacacacactctcagagggatagataagtggggcgtggggcagatgggaacacacacacgcacacacgtcacaactgggcatggccggggaagcaggcctcaccgttgatgtccacttgcagtgtgttatccctgctgtcacaggagcagtgggcgctaaggcgaaagccctcaatttcccctgtaggagtggcgagagggaagccagtctgagagtgcagctcacccagcccctggaggaagaggaaggaaggagcaaaccccaggggcttccttcctgcctcccccacccaccccactctgccctctcactgcagctctctctttttttttttttttttttttttgagacaaggtctcgcagcctcaatctccaaggcccaagcaatcctcccatctcagcctcccgagtagctgggaccacaggcgcgtgctaccacgcatggctaattttttttttttttttgagatggagtctggctctgttgcccaggctggagttcagtggcgtgatatcagctcactgcaacctccacctcccaggttcaaacgattctcctgcctcagcctcccaagtagctgggataacaggcatgcgccaccacacccggctaattttttgtatttttagtagagatggggtttcaccatgctggccaggctggtctcaaactcctgacctcaggtgatccgcctgccttggcatcccaaagtgctgggattacaggcttgagccactgcatccggcctacacggctactttttaaattctctgtagagacagaggtctcactatgttgcccaggctgggctcaagcaatcctcctgccctggcctcccgaagtgctgggattacaggcatgagccactgcacccagccagcatcaatctcttgaatgaatgagtgaatgatgttttctaggctcctacaatgtgccgaagcctgtgctgtgtgcttgggactcagcattgaccaagacagatgagctccttctaggcctttgtcgaacagcccaggacactcctcccagtgcccacctgctccctaatccctattttttctttttcttttcttttttttttttgagacggagtttcactgttgttgcccaggctggagtgcaatggcacgatcttggctcactgaaacctccacctcctgggttcaagcaattctcctgcctcagcctcccgagtagctgggattacaggcatgcatcaccacgccgagctaattatgtatttttagtagagacggggtttctccatgttggtcaggctggtctcgaactcccgatctcaggtgatccacccacctcggcctctcaaagtgctgggattacaggcgtgagccaccatgccaggccccctaatcccttttttttcatgtggccaaactactatttatcctgtgagtctccacacaatcaccctcacccagcaagccctcctagactccccagatgggtccaggtgccttctctgggctcccaacagcacttagggcgttcccccatcctgcatgcctccctgtcccagccttgtcctccctgctggtgcctccccatcccattcttgatcattctaggtcattcctgcctggtggggccttgacaagatctcttaggtgtccagaagtgactgtgggccccatgagggcagaactgagggctgtcttggttatcactatgtcccccacaccacccagcacatggccaggcacacagcaggaacctgtgggcaattattgaataaaagcataaatgagagggaggtgagggagagagataggggcaccatgggccctgccagaaaccagacagagacaatcatctcctggacagatcaaatgagttagttaggctctccctggcctccaggcctttgcacaggctgttccctttgcctggaatcttttttttttttttttttttgagatgggatctcactctttcatgtaggctggattgcagtagtgtgattatgactcactgcagcctcgacctcccaggctcaggtgattctcccacctcagtctcccaagcagctggaactacaggcacgtaacagcatgcatggctaatttttgtatttttgtgtagagaccgggtttcgccatgttgcccaggctgctctcaaaactcctgagctccagtgatccatcctccttggccttcaaaagtgctgggattataggcataagccaccatgcccagccccagaatactcttacacctctccttttcctgaccattctactcatcccttcaacatcagctatggtgcccctcctccaggaagccctccctgattctgggctgggtcaggtacctcctttgggctccccatcccagtcccacccactctgggtcatcactgccttacaggtctgttccccagctacctagccaatggactatatgagctctgtgagggcaaggatggggctgttttggtcattgctgtgtccttggcatcacccatcacagggcagggcagagaggtgctcaggaaacagattagccaatcactcaggtttccatgccacagaggggagccaggtctcagcactttcacaccagtatggggcggagaggggtcctaggcaaagtgaccccaggacaaacaatggggtggaccccagggagaaacaggggtgggacacacaagtaatcctcacctccacggctcaaccactgccgcacaactccggtgacatcaaaagataaccactctggcgagtcgctgggtgccagcagccggttgctgaggtatcgccaggaattgttgctgtatttctagaggatgatgaaggcaggagagagacagtgggtagatggtgtcacgaccccacatacactaactgaatccttcaccccatctgcttccccaaacaggcttccagaaagttcccaggcactaccctctcagacagccacctgtgtggtcctgtggcacccatcctccccaacagtacccatgagaggaggggtggagaaaaagctcaggctgcggtcaagtcaccttcacacagctcagccgaaggtgttttcttgccttctcgaggcctgtttcctcattggtgaaatgctaagccccactcagcgtggacagcccacaatgctaaaattctgctgctaacattctgggccgggcgcagtggctcacgcctgtaatcccagcactttgggagcccaaggtgggtggatcacttgaggtcaggagttcaagaccagcctggccaacatagtgaaaccccatctctactaaaaatacaaaaattagccaggcatggtggcacacgcctgtagtcgccactatttgggaggctgaggcaggagaattgcttgagcccgggagacacagactgcagtgagccaagatcacgccactgcactccagcctgggcgacaggacgagacttcgtctcaaaataataataataaataaaataaaattctgctgcaaacattctggggtttactgagcatacggttctgcaaatttgacaccctgaattctcagtaacttagaagtcatttctaatgattccggctgggcacggtggctcacgcctgttatcccagcactttgggaggccaaggcgggtggatctcctgaggtcaggagttcaagaccagcctggccaacaaagtgaaacctcgtctctactaaaaatacaaaaattagccaggcgtggtggcacacgcctgtaatcccagctactcaggaggctgaggcaggagaatcacttgaacccaagacacagaggttgcagtgagccgagattgcaccactgcactctagccagggtgacagagtgagactctgtctcaaaaaaaaaaaaagtcattttgtgattcaaatgtttgataatatcccaagatttccacttctagagcctgagaagctttagaagactaatgttctataaacccaagagtctgccatgccgcacctagatgctgcaggtacccaacatctgtgtagaataattttctgggccaggcacagtcgctcacgcttgtaatcccagcactttgggaggccgaggagggtggatcaccagaggtcagaagttcgagaccagcctgaccaatatggagaaacaccgtctctactaaaaatacaaaattagctaggtgtggtggtgcatgcctgtaatcccagctgctcgggtggctgaggcaggagaatcgcttgaacccaggaagcaaaggttgtggtgagccaagatggtgccattgcactccagcctgggcaacaggagcaaaactccatcacacacacacacaaaaaaaagaagaattttctggggctggatagtccactccagggactgcagaataaagctgaattccccagactccaagaagccaagctaacataggacaaagttctctcactgtgaaagtctgaaatctaccatcctatgagttaacattccctctgatatggattctagctcatagaaactgctagagcctccagcccttccagatgccccagtcctcttggaagctccctatcttctagagcagtgctgtcctaaagaactttctggaaatgtgctttatctgcaacatccaaaatagtagctgctaaccacatgtgactatagagtactagaaatatggccagtgagaatgaggatttctttttcatttttatttttttgagacagagtctcgctctgttgcccaggctggagtgcagtggtatgatctccgctcactgcagtctccacctcctggggtcaagcgattctcccacctcagcctcccaagtagctgggattacaggtgcctgccaccacacctggctaatttttgtatttttagtagagatggagtttcgtcatgttggccaggctggtcttgaactcctgacctcaagtgatccacccaccctggcctcccaaagtgctgggattgcaggcatgagccaccacgcctggcctatatatatatatttttgagacggtctcgctccatcacccaggctggaatgcagtggtgcaatcacagttcactacagcctcgacctcctgggctcaatcaatcctcccacctcagactactgagtagctgggactagaggcacgcatcaccataacaggctaattttagtattttttgtagagacgaagtttcaacatgttgcccagactggtctcggactcctgggctcaagcaatctgcctgcctcggcttcccaaagttctgggattagaggtgtgagccactatgcctggccctaaatttttaatttaattttaaacaatttaaattttaatcaagctaaatgtgactagtggctgtcatattggacagaatgattctagagcccccaaccttttcagagattccaactttcaagaatcctgtgtccttaaagagtccaactcctaagattccagccttctaagtgtttaacatcctaggatgcaaagagtctgaacatttaaaagtgctctaggttccgggtgcagtggctcacacctgtaatcccagcactctgggaggctcaggtaggagaatcacttgagggcaggagtttgagacaagcctggccaacatgataaaactctgtctctactaaaaatacaaaaattagcccagcgtgttggcacatgcctgtaatcccagctactcgggtggctgaggcaggagaatcacttgaacccaggaggcggaggttgcagtgagccgagatcaccccattgtactccagcctgggcgacagagcaagactccatctcaaaaaaaaaaaaaaaaaaaaaagaggccaggcgcagtggctcacgcctgtaatctgagcactttgggagaccgaggcaggtggatcacgaggtcaggagatcgagaccatcctggccaacatggtaaaaccccatctctaccaaaaatacaaaaattagctgggcgtggtggcgcacacctgtaatcccagctacttgggaggctgaggcaggagaatcactggaacccaggaggcggagattgcagtgagctgaggtcataccactgcactccagcttggcaacagagtgagacactgtctcaaaaaaaaaaaaaaagcgttctaggattgtatggtttgtgttcttctatccttcagggaccatctaggtggaccttgtaaccagccgacccacagccacccccttggtcacagctcaccctctccagcccatgccctgaccttccttctggctcatgtcctcacctggtacagctccacgtgctgctccacttttaacttgagcctcagcagacgcagctctgcccgggagagcaacacgggttcaggtaccgcttctcggagctctgatgtgttgaagaacatatatatgctgtgtgtactctgcttgaacttgtcatagatttctagcagggagaaatgaagggaggcgatcaggggtttggcagaggtgaggggagctggtgctcccaactctaggagttttggagctgacagctctggggtggagtcagtctctgataccttttatttatttatttatttatttatttatttatttatttatttaaatgaatttttttttttttttgagacggagactcgctctgtcacccaggcttggagtgcagtggcgcaatctctgctcactgcaacctccgcctccagggttcaagcaattctcctgcctcagcctcccgagcagctgggactaaaggctcatgccaccatgcccagctaatttttgtatttttagtagagatggggtttcaccatgttggccaggatggtctcgatctcctgacctcgtgatccacccgcctcggcctcccaaagtgctgggattacaggtgtgagccaccacgcccagccctgactgtgatactttttagctgtgtgaccttgaggaagtggtttctccccctaggtttgtttcctcctctgtaaaataggtcctaaccacattcctctctcatgtagcatcatctctcaagtcgactaaggctggcaccaaggggaaccactctgtttgctctggccttccttgccccaaatgcaagagcccctaaaatgcagagtaaggatcaaaggcacaggctttggactcagatagtgcctctgctgcctcttggctgtgtgaccatgggcagttaacaccctctttctgaatgtcagtttcctgttattctttgaaaaacagcaataacattaagctccctgcattcccacacagactctcctaatttaagcgctgtgtaaccttgggcaagtgaattcctctctctgagccaggtgtaagacaagacagagtgactctagaacccattccagtattatagtgggaaattagatgacccaggtcaagccatgtggcaccaattctgcatacactggtcactcaatcatgtatacgtctaagagtgctggctgggcgcagtggctcacgcctgtaatcccagcactttgggaggccgaggtggattgattacttgaggtcgggagttcgagaccagcctggccaacatggtgaaaccccgtttctactaaaaatacaaaaattggccaggcatggtgccggacggctctaatcccagctacttgggaggttgaggcatgagaatcgcttgaacctgagaggcagaggttatagtgtgccgagattgcgccactgcactccagcctgggtgacagagtaagactctgtctcaaaaacaacaacaacaaaaaaccacaaaacagcgctatttaccagatgctatctaaagcactttacaaagatgaagacatttaaacctcacaaccttatactattattatacccgtttaatagatgagaaactgaggcaccgagattaagtaatttgccccaaggtcacatagctgcagactgggattcaaactcaagctgtctcattccagagactgtgctttttttttttcttcccccaagagacagggtctcactctgtcccccagacggaagtgcagtagcacaaccatggctcacggcaggctggaactcctgggctcaagggatcctcacgcctcagcctcccaatatgttgagatcacaggcatgagccaccacacccacccagctagagactgtgctcttaacccctaagtgattcttctacttatttttattattagttttccacccttaactcccttccccagctggttagggaaagtgaagttcattctgggtaggaatggctgtagtggggagaaaaggaattaaggtgttttcttttctttttttttttttttttttgagatggagtttctgtcgcccaggctggagtgcagtggcgcgatcttggctcatagcaacctctgcctcccaggttcaagcgattctcctgcctcagcctcccaagtagctgggattacaggcgccgcccgccaccccgcccagctaatttttgtatttttagtagagaccgggtttcaccatgttggccaggctggtctccaactcctgacctcaggtggtccacccaccttggcctcccaaagtgctgggattacaggcgtgagccaccgcgcccagccaaggtattttctagtttaggaaaagtttggggatggggatgagggaacaggccatgaactgctggatcaactggggcaactgcttccagcctcccatagtgggggtgtgaaaagagactggtgagaaaggcagaggaaacccctcccctacggcccccttcgatcctcctcctcctccccagtctccctccccacccagccccagtaagccctattcttggcccggaggttactcagcaaaccccaaaggaaaggcagagccttggctggggaagacagatagggaggaagacagagaggagggagaggaagggttggagggtgatgcagagagggagaggcggggagatgtcagagacggagacgaggcaacaggaccgtggaggagaaaaatagaaagggagagaaaatagtcggagagacaaaaaccaggagacccatgcgtggacagaaagactaacggagacgaaaagaaagaggcagatggggagacacgtgcgagacgagacacatgtgcatttgttggggagaagaggattggaggtgtcagtgttaaaggaacctctacaacgaaggtgaagccacggaagataaggtaaggctgagacttgggtgcggagtgcgcgtcattgggctggagctgtaaactggcgcagaaatgggcagggaacccgcaagcccacaccgcccaagagtcagtgaaacctgagggatcttccccaaggctctgaaccacgcgggacgcctgggtcctcgcatggatgccgacggggccggctgagtgggagccccgcccgtagctggggtgaggagggcgggaggcgccgcagccaggagggcggggaccagacctgccccgtctcgccccgggctccgcgagcgatccccgcctccgccgggggcatgggaaggaaagggaagggagggggatgaggccgccggacgctggggtttccccagccaccctgagaggaactgggactttggggtccagactgccagcgtttagcgcagcggggtcctcctgccccttggtggaagcgcaggctcctccccccgcgcgtggcacccacgtggggctttctcactcctcccagcttggttttctcacctcggtcttgtagagtcaccccccacccagcacttcccctgcggctggactccgctcagcccattcccctgcatcctgcggggaatgcagcgtggatggcgctgggtatctctcctcctccccgctcacaccacctttcccacgcctgtctcccctctcggtaaagcccttcccatgacccaggactctaggtcttctggaagctcgattcctccgctgggctccccactctgtccctcacgtccctgtgtgaaacaccgaggacacctctgcatcccgggcgccctcccgagtctccgctcctctcccgcttgcctcctccttccaataacctcccgtccctttctccccacatttatcacacgcacctctgtttctctttctacgactctcccccacccccgcatcccgcgtgttcctggcagcctctggaagtgggtccgctctcactttcctggcaccctctggggttgccttcatctagcttttctgtccttcttgaatctttccacctcaggacccccaagctctgggtcaactttctccagcgcctctcctttcccaaatgctggggtcttcgcttctcccacaccaggctcccttctctgcacctggcaccccacgacccccccccccattcaacgcgtcctggaagagggagccttctaccctccccctattgcttgtctccctctaggggactgcccccacgaccccgcatgtttctgtcgcactctagaagcggtccacttcgctatctcctcctctccaagaccagacacctgggtggtagggggctcagtgccatcctctttcggacacccccctcccaccatcacacgttccctttgccccggggtgtcctcttcctccagccagtttcttctgccagtcacttcctacccgtggccccggcactccggcgccccctgggggcccccctcccggctcccctgcccctccgagctcaccgttgtgggtttccaccattagcacgcgggtgacctccttggcgtagtagtcggcctcaggctcgggctccggttctgcactctccccggccacccggtcgcgggtgctgttgtacagggcgagcacggcctcgggcagcgggccgggcggcacctccccctggctcggggggctggcgagccgcagcttggacaggatctggccgcggatggcctcgatgcgcttccgcttcaccagctccatgtcgatagtcttgcaggtggatagtcccgcggccggccggccaggcgtcagcaccagtagccacagcagcggtagcagcagcggcagcagccgcagcccggagggcggcatgggggaggcggcgccccccggcactgccgagagcgcgaacagggctggtgtggtggggaggccccgcccctgcaggggctgggggtctcccggcaaaaggtaggagggcctcgagggaaagctgaggtcctcagggagaagggcgcagtggtggaggggaggcttggaccgggggtgtctcagtatcccacggaaataacctagatgggcgcgatctggtaccagaaggtgggtggtcttgaataggggatctgtggcaggtcggagagagatccgtctcctggaggagaaagggtctaggatgcgcgggggctcaggagacaggccggggatgaaggcggcgtgcagggggtgcgcccgaggtctggggaaaagtctttgcgggaggccgggtcggcgactcccgagggctggtccggaatgggggcgcctgagggacgccgtgtagggggcagggagggagcaagcgtccccggcggcaaagggaggcggtctggggtccccaagtcctgcctcctcgcggggcagcgtcgcgccaagaggtccccgcgcctccggctcccagcggcaacggaaaagtctcaaaagtttttttcctcttctcccgaccagctcgtccctcctcccgctcctcctccccctcctccccgcagtggcgggggcggcggcggctcgtctcagactctggggcctcaggctgctcctcggcgactccttcctccgctccgggccgaggccggccccgcgggcggctcagagccgggggggtgccccggacggggcgtcccccctgcccccggccggggccctcgctgtctggctgctccgcggagggaggtgggagggagatggcccagggcgcgaagggcggcggcggcggggaccggctgggtcggcagggggttttgaagccgcccccggccccacccaggaagcgcacggggcgggagcgggggcggcccccagggggagggcatgggggggctgggccaccgtcctcatctcgcgtgggcgggctccgaggggggtcccttcagccctgggggaaagggggcgggcaccccggctccgccccgcaaacagggtgctgcctcctggcggccaagcgccaccaaagcgggtgatccagatgcgctgtggctttgcgggcggtgtgggtcaccagagaaagaggaccaggcggagaaggcttaatccgggggatgagacacaggggagccgaccagaggagggggacccagaacggaaggagagtcaggctgggaaacaaggtaggagaagagggtctgtcaacatgggggcctccggagggtgtcagtgggaggagggggcaacaggacacctgaaggatggaagggtcaggaggcagacacctgtaagaattgctctcctttactgagcacctcccatgtggctaagcagcctcctgtcactcaacaccctgcgaccccatacatttactgtccccaatttacagatagggaaactgggcccagagggaccccgaggtcctagaaaggacagaagcggtgccatgccttagctggggtcagctctgacagtctctagagtctgtgctcttgaccactgtgccatcctcccccatcactgggtgtccggggtgtggatggtggtgacgttggaggcagagtccctcagcactccacgccgtagcggtcgaagttgcggagcagcaggccgatctccaggtgcacggtgccaccagcagctgtgtgcaggcgatagcggtcggccccactgtagatggtgtccccatgcagcagctgcggcccaccacccacgaaagcccgtgccaactgttctcgccaactgcccaggggccgccacgtggggcaggccagctggtgggtgcccgggctactgggcacatggcaaaatccatagcctgcaagctggcagcggccaaagctgtcctgggaccacacctggaaatggagccggggccagcctgcaggaaaggagagagaggggaaaggagggatgggtggggaccagactcctgctgattccccactccctgatactcactggagaccccaggcccagtcttttcctctctgggtttctgtcccagagtttccaacccagcctcctttctaggctcccaccgtcttatctatccccacacagcagccaaagtgatctttccaaatccatgttactcccctgctaaggatccttccatagctccccagtgccctcagtataaagtccaacctcttcaacattcaaggcccttctaatcagacctctgctgaatttcctctctgtgttatcctcctccatgaccccatgtcagggcagcccattgctcctccagtccccaggtaaccatcatgggccttgtcagggacacctcctgccttccctcatgtccctgccctgctctctttgggcccagggccttctttcttgcccctctctaatccaccttccacctggcatctggaagcatctttctctccttccatagctttgcccatgtcctcagaacacagttcagctcctcagtctggtagtcaaagcccttggagatccagccccatctcatctcatgctgatcccttctcctgtgctagactctgttctagctagctggggacacggcagacatgaacatggatggcagacaaaaattcctgcccccgtgaagctgatatcctagacaacgaatgtagtaaataagcaaattatagggtagatcagatggtggtaattgctgtgagggaaaacagagctgggtagggtgagggtggggataccgctttagcaagaaggggatcaaggaagcttcattaagaaggtgacatttgagcaaatgctaaaaggaaggaagggagtaggccatgtggccatctagaggaagagtgctcctagccagagggaacagcaagtgccaaggccctggggggggactgtctggtggggacagtatggctggagcccagacggagtgtgcctggtggggacagcatggctagagcagaatgaggtggggagacgggaaggaggtgccagcctggttgtggagagccttgtgatgcatgctaagactatggctttcaccctgagtgagatggggaccattggagggttctgagcagagcagagatgggacctgacttaggtgttcacagggtcccagctgcatgtggggtgcagaccaggggggttggggaaggggactccagagacaagattcttgtcatagtccatgtgagagaagaacttggacagatcaaggtgctgggcgagaaaagggtaagaagtgggatttaggatgtatttcaaaagtagaggcagtttaagatttcctgatggacaaaatgggggcttgagaaaagagaaagcaaggctggtgccaccactgggggactggaggccccaagagctgaaaggttagagctgcccacctcacccacacagcaccggaaagattttttttttccccagctccagcttaaaagacagaaagattatttaaaagtgaaatctcagccaggcgcggtggctcatgcctgtaatcccagcactttgggaggccgaggcaggtggatcacctgaggtcaggagttcgagaccagcctgaccaccttggtgaaacgccatctctattaaaaaaaaaaaaggcaaaaattagccagatgtggtggcacgtggctgtagtcccagctactcgtgaggctgaggcaggagaattgcttgaacctgggaggcagaggttgcagtgagctgagatcttgccactacactccagcctgggcaacagagtgaaactctgtctccaaaaaaaaaaaggtgaaatctcacttgtccattacctgctctggctcccaagtgccttcaggagatggcctcagctcctcagcctggcactcaaggccctgcatggcctgtccccttctgcctttcccctctgccgtcccgctctccctcaatccactagatgcccttggctcactttcccctttgagtcttccacgtagctccctctgcctagaaccttcttctatccctctgccttattagctccgctggcccttcacagcaaagttcagaagccccctcctccaggaagccctctctgacctccctgacagagtcagccacttcctctgggctcccacagcctctccaaatcacctatcttagtcctgcccactctgaggtgccactgtctggagagaggtgtgtccccccataggacggtgaaccctgtgaggacaaggctaagggacactgccttgatcctcaatgtctccctggcatcacccaacacaggctggacacagggcaggtaccaggtagacgttctttatattggtgaaatatatggcacatttacctaggcaatttctcagaatcaactcatctccaggaacccacattttctactagaaaggctttctgatgccgctcctcccccagtactgatttcccctttgagcagcagctctactttcaagccgaggagcccttcctggagaaacagcccttgcctctctcagaccctgcctcccggcttcctctttattggagactctcgttttgtctctttacttgaatgccacctcccctcccaccctgaccccccaccttcccacctcctgctccaccctggcctctgccctaatcatacaaacttgggatcgcctattgagcaggcctgggaaggccttagctcagcctctccagggccagacttggctgcaaaagggacctacgtggtatggggagcagggacaggtcttggtgttcccagccccagggacctcagaggctactggccccctcccctcagcctggacccgggtccaggtgtgatacccaccttgaagacctttggtggcgaagtgcaggtcgatggggtgggaccagtaagccatgtcccctatctgcggggtgtccacttgcgtttggccctcccgcacgcctgacaggagcttccatgccgcccctgcagtgagagccgggacatagaggggtgggaggcagccatcgggaaggggatgccgctgtggctataggactgtttctctgtggcatctactggtaggggttacgaagcatggactctggaaccaagtatctgggttcaaatcctggcactacctcttcctgcctctgcaaccttgggcaagttagctttctctgccttggtctccccatctataaaatgagctgagtaataatgcattcctcattgtcttcatttgttttctgttactcttaacataatatccaaaactggataatttataaagaaaaggaatttctatctcacagttataggagactgaccaaggtggaggagccccatctagtaagagccttcttgctggaactcttcagagagtcccaaggctagtgtgctaacatgccactcacgtctctctctctcattttataaagccaccacttcctctcccatgataacccactaatccattaacccattaatccatgaatgggtaatgagcatagtgagcacgggataagtcttcaatatcattttattacgattctcaccccatattttcaagcctagtccaaggattaagatggggccaagggtaccctccaggagcgcatcctgaaacacacataacaatttcgatcctactgaggggtgataatgatagctaaaatgcactgagtggtaggatacagtggctcacacctgtaatctcagcactttgggaggccaaggcaggtagatcccttgagtccaggagttcaagaccagcctgaccaacatggcaaaaccccatctctacaaataatataaaaattaaggctgagcgcagtggctcacacctctaatcccagcactttaggaggcttaggggggggtggatcatctaaggtcaggagttcaagaccagcctggccaacatggcaaaacctcgtctctactaaaaatacaaaaattagtctggagtggtggcaggtgcctgtaatcccaggtactcgggaggctgaggcacgagaatcgctggaaaagctgcagtgagccgagattgcaccactgcactccagctggtgtgacacagtgagactccatctcaaaaaatgaacaaacaagccaggcgcagtgactcacgcctgtaatctcagcactttgggaggctgaggcgggctgatcacctgaggtcaggagtttgagaccagcccggccaacatggcgaaatcccatctctactaaaaatacaaaaattaggatgggcgcagtggctcacatctgtaatcctagcactttgggaagccaaggcaggtggatcacttgaggtcaggggttcgagaccagcctggccaaaatggtaaaactctgtctctactaaaaacacacacacacacacccacaaaattagccacgtctgtaatcccagcactttgggagactaaggcaggcagatcacaaggtcaagagatcgagaccatcctggccaacattctgaaaccctatctctactaaaaaaatacaaaaattagctgggtgtggtggcgcacgcccatagtcccagctactcaggaggctgaggcaggagaatcacttgaacccaggaggcggaggttgcagtgagccaagatggtcccattgcactccagcctgggcaacaagagcgaaattccatctaaaaaaaaaaagaaaagaaaaaaagaaaatgcaccgagtactaactaaatcccagatgctatgctaagtactttaagcatccattcatttaatccaccctctaggactcttaatcccctcctcaccccccagtttacagaccctccaccatggcccacgtggcctggctcttgctcccctccctgagttcatctcccatcactctccccctccctcatcaccctctggcctcactgtcccacttctgactccccacctcagggcctttgcactggctgttccctctgcctagaaagctctgctcctgggtgtccccatccctagcttttgttttcatccttcagggcccagctcaagtgccacttccacagaggggttctccctgaccctcttcaccaaacactagtccctgccacatcatttcttttcatcctagcacttaccactgtctggaatcacggtgctcctttctttttttgggggggtggggggagacaagatctccctctgtcacccaggctggagtgcagtggcacaatcacagctcactacaaccttgacctcccaggatcaagcaatcctcccacctcaacctcccaagtagttgggacgacaggcacacagcactatgctttgctaattttttatttatttgtagagacgggggtctcactatgttgcccaggctggtctcaaactcctgggctcaagtgatcctcctgctccagtctcccaaagtgctggcattacaggggtgagtcaccacacccaactgcactcgtttatctgtttatttattttattttatttatttttttttgagacagacttttgctcttgttgcccaagctggagtgcaatggcaccatctcggctcactgcaacctccgcctcctgggttcaagcgattctcctgcctcagcctctcgagtagctgggattacaggcacacgccgccatgcccagctaattttttttgtatttttagtagaaatggggttttaccatgttagccaggctggtctcaaactcctgacctcaggtgatctgcccgcctcggactcccaaagtgctgggattacaggcatgagccaccgcgcctggcctgcttatttattttctgtctcccctactgtatggcccaggaaaacagggaccttgcacactgctggatccccaagaccacaaacccagctcttggtatacagaaggtgctcaataaatgtttcttggacaaataagtgatcctaggaggtgggagctaatataatccccatttaacaggtaaagaaacaggctctgagaaggtgagttcatgaacatttattcagcacctgctatgtgccaagcactgttttccatgctggtgacatagcagtgactatagcagaccaaggtcccatcatgggactggattcagactcagctctaactgcagagcccaagcctttcatccaactgcctcagtattcttggctggatcaacatccccagcaactccctgaaataataaaaatcaggttagtcattactcccttctgggctgagttgagggaagcaccaggccctgcgtcaggctccttaaaagcaagatttcccaacagccctatgaagaacaaatgaggaaactgaggctccaagaggggacagcctctgcccagggtcacagagaaggtgagtggtccaacctggaaaccaagtctgactccagagcctgcccctcatccatcagctggagggttccgatttcctgggaatttcaacttccacctcacttacctgtagaatcaaaaaggacccaggggccaggcgcagtggctcacacctgtaatcccagcactttggaaggcctacgcaggcggatcacttaaggccaggagttcgagaccagcctggccgacatggtgaaaccccatctctactaaaaatacaaaaattagctgggtatggtagcgggtgcctgtagtcccagccactcgggaggctgacataggagaatcgcttgaacccaggaggcagagattgcagtgagccgagatcgtgccactgcactctagcttggctacagagtgagactctgtctcaaaaaaaaaagggccaggcgcagtggctcacgcctgtaatcccagcactttggaaggcctacgcaggcggatcacttaaggccaggagttcaagaccagcctggccgacatggtgaaaccccatctctactaaaaatacaaaaattagctgggtatggtagcgggtgcctgtagtcccagccactcgggaggctgacataggagaatcgcttgaacccaggaggcagagattgcagtgagccgagatcgtgccactgcactctagcttggctacagagtgagactctgtctcaaaaaaaaaaaaaaaaaaaaaagggccaggcgcagtggctcacgcctgtaatcccagcactttgggaggccgagatgggcagatcacaaggtcaggagatcgagaccatcctggctaacacagtgaaaccccatctctactaaaaatacaaaaaaaaaaaaaatagccgggcatggtggcgagcgcctgtagtcccagctatgcaggaggctgaggcaggagaatggcatgaacctggaaggctgagctagattgcaccactgcactacagcctgggaaacagaacgagtctcaaaaaaaaaaaaaaaaaaaaaaaagggactaggactcaggcctgaagacatgataatgccaaatggccacatctgtttcatagacattcatctgtgccacgcaacaacataccccaggctttacaaacaagaccccatcaaagtcttgtataagccaggcaaacactgaatgagcacttcctattccagccctattcctattctaagtgctgttgatactcgtttagtactcatgacaacttcaacaggtaaatatttctatgactctcattgtacaaacaaggaagtcgaggtgaagagaagtgcccaagttcacataatcagcccaagggtgccttaacaagcaataactggttttgaacccaggcagtctgtgctcttaacctcaaacctgtgctgcttcttagctactattagcttcactttgaaacaaggaaactgaggctcaaagtggtcgagtccaaaggtctccaattaataggtgggggagttaatatttaaatgcagatctggcagcccatgaccctaaccattacactataccatgactctatagggcctcagttggggaagcatgaacaaaattactttcctgggacgtggcggctcacgtttttaatcctagcactttgagaggctgaagtgggtggcctgtttgagcgcaggagttcgagaccagcctgggcaacatagcgagaccctgtctctacaaaaaataaaaaaaattagccagatttggtggtgcgtgtctgtagtcccagcttctcaggaggctgaggcgggaggatcactagagcccgagagttcgaggctgcactgagctatgatcacaccaccttactccagcccgggcgcagagagagaccctgtctgtatcccacccctcacacacacaaagatgggagcttgagactcatgtggacagggtgtgggctgggcctggagtactgagaactgatggaaatgaggttaagagtctgcgttaaggggtggaggaaggagcatgtagcctctaggctaggggtcttggtgtggaaatgaaccaggcttgggggaatacctgtgtgaatgccccacttgcagaagaggctactttccgagaaaccgctggcccctatgatctgcccgatcacgtgcacctcagccatggccctgggaggggaaaaatataatcacaaccctgtgaggtaagtgtattatctccatttgacgggggggaaactgaggcccagcaagtaaagggtagtactaggattccaagctagcttcgtcacacccctgaggctgaggtcttgaccacagatcctaattgccaacccatgaaagcctggaaaaaatggggggacccttgtctggggaaccagcatttaactctgggaagtccaaaataaccttttcgggttcaggtcggcggaaagccccgcccgaaggggctatggctccgcccacgagcgcaaaagacccgccttccgcgtcacgccagccaccccgcttccctcccccagcaagctccataaggcgcatgcgttatgagttcaggtccgacttaaccccgcctctaagcgcagcgcatgcgtcattcctaccttagcgcacttaacggttaggagaggagaaagcggcaaccggggttgtagttcatgggcttgactgcttcttttctccgcgggcgccgaccaggcctggctcgcgcctctcccaggacccgcctggctgcgagatatgtaagccgcgatacttccgcgaccgcgctcgtcttggtttccgtggttgttgctggggcaacagcaggctcctcccctagctttgtactcgctctgcgcgctactaattggtgctagccgtctgcggggggcggggtgaagctgtgatggacattttcctcctccgctccattttgggaaaatagcgtctctccagctacggcaaagggttccgccattttgggcgtggctaggaagctgccatgttgagtgtggctgaggaagtttgagtgcagtttctcccagataccttctttaccaaaaaagcaaatccctaactgctccgtgctgcgcctaccccaccgaagagctctctgtggtccgggatcacaaatcagagattgaaccaggaccaagggggaattccttccaggacctcgtgtacatccccggccttgtaactggaaaacaaagcaaaaaaatcactcctcattcagagagtggagaagttggggagtgggttctgcttccgttttagagttcccctaggtttctcaaggacaaggaaggaaggaagttggataagtccaacttccttctcggagctactaccaagttcactgttactgcttgattctgagcaaggagcggttggggtagcgaagagaaatgaggaactaagattcccttatttgcagaaaatcctctttcctattgattgatttatcaatcaagaaatggagatgttgtccctggatgccatcctagatgccatcatttcccacatcaagccagtcatcaggtcccatcaaggctccttaaaagggtctcactctgtcacccaggctggagtacggtggctcgatcacagctcattgcagcctcttaactcctgggttcaagggatcctcctacctcagcctcccatgtagctggtatcacagacatgcaccaccacggctggctaattcttttttttttttttaagagatggagtcctgctatgttgctatgttgcccagtcttgtcttgacctcctgggctctagctatcctcccagttctccctcccaaactgccgggattacaggcgtgagccacccagccaggccaatagatacaaagtatttacaagctaccattggctaggcgcggtggctcataactgtaatcccagccctttggaaggctgaggcgggaagagctcttgaggccagaagttcgaatatagggagaccccattaataatgcatatatcaactagtgaagtattccattgaattgtttaatataaatgttatcctattgaaatgttgtaccctcgttataattttggttttttactttttgagatggcgtctccccctgtcatccaggctggagtgcagtggtgcgatcccagctcactgcaatctctgcctcccgggttcaagagattctcctgcctcagcctcccgagtagctgggactacaggcgtgcaccaccacacccagctaatttttgtatttttagtagagacgggttttcaccatattggccagaccggtctcaaactcctgacctcaggtggtccacccgcctcagcctcccaaagtgctgggattacaggcgttagccaccgtgaccggccgggtttttttttttttttttttttttgacagagtctccctctgtcgcccaggctggagtgcagtggcatgatctctgctcaccacaacctccgcctcccaggttcaagcaattcttctgtctcagcctccttagtagctgggattgcaggcacccaccactatatctagctaatgtttgtgcttttagtagagatggagttccaccatgttggtcaggctggtctcgaactcctggcctcatgtgatccttctgcctcagcctcccaaagtgctgggattacaggcatgagccacctcgcctgggcccagctactttttgtattttcttttttattttatttatttacttttttttttttttttttttgagacagaatcttgctctgttgcccaggctggagtgagcctctgcacctggcagaggtttcacttttaaatgatctttctgtcctttaagctggagctggggaaaatgtatttatttatttatttatttctggatgctgtgtgggtgaggtagacagctctaacctttcagctcttggggcccctggtcccctagtggtggcaccagccttgcattctcttttctcaagcccccattttgtccatcaggaaatcttactgcctctacttttgaaatacaccctaaatcccacttctcacctctttgtcgccctgcaccttgatctgtccaagttcatctatcacctggactatgacagggaccttgtctctggggtcccctttgccaacccctctagtttgcaccccacatgcagctggaaccctgtgaacacctaagtcaggtcccatctgctcagacccgtccagtggtccccatttcactcagggtaaaagccaaagtcttatcatgcatgacaaggctctccacaacctggctggcacctcctgcctcatttttgtatttttagtagagacggggtttcgccatgttggccaggcaggtctcaaactcctgacctcaggtgatctgcccaccttggcctcccaaagtgctgagattacaggcatgagccactgctcccggctgaggtcttcattctgaaggctcccatgtatacatgttaaataaaagaaaataaattatcgtcaactataaataatgagattcagaaaatatgattgaggccggattcggtggttcatgcccgtaatcccagcactttgggaggccaaggagagtggataccctgaggtcaggagttcgagaccagcctggccaacatatagcgaaaccctgtctctactaaaaaataccaaaactagatgggtgtggtggcacatgcctgtggtgtcagctatttgggaagctgaggcaggagcatcacttgaacctgggaggcagcagttgcagtgagccgagatcacgccaccgcacttcagcctgggcgacagagccagacttctactctcaaaaaagaaaaaaaagaaaagaaaggaaaatatgattaactatagagtttattccaggctacaggaccagtacatatgttacaacagtttcattagtacatcttgctatgctgcagggaagattgcgttaacattctgataggaggaggagtactctttctttctttctttctcctttcttttttcttgagataagatcttgctctggggctgggcgcggtggctcacgcctgtaatcccagcactttgggaggttgaggcgggcaaatcacgaggtcaggggttcaagaccagcctggccaacatgatgaaacctcgtgtctactaaaaatacaaaaattagctgggcatggcggcgggcgcctgtaatcccaagtactcgggaggctgaggcaggagaatcacttgaacctgggaggcggaggttgcagtgatctgagatcgtgccattgcactccatcctgggggacaagagtgagacaaagtctcaaaaacaaaacaaaacaacaacaaacagatcttgctctgttacccaggctggagtgcagtggcacaatcacagctcactgcagcctcgaacgcccaggctcaagcctcctgcctaagcctccccagtagctgggactacaggcgtgtgccaccatgcccagctaatttttcaataattttttctgtagagacatggtctcactctgttgcccaggcttgtctcaaactcctgggctcaagtgatccacctctgcctcccaaagtgctggggttacagatgtgaggccacaacacccggcctaggagtaatgttctgaggtgatcttatctctggcactgcttggtcattcttaatcatttacaggaaaaagcagaagttgtaactgcatgctacgtgactcaggctacatagcaacattcctctcaaggcttggaataatttaaagttccaacagctttaagtttgaattatctaaccacattatcgaaagttggccaggcctggtggttcatggctgtctgtaatcccagcacattgagaggccacagcaacaggatcacttgaggccaggagttctggaccagactaggcaacgtagtgagaccctcatttctacgaaaacgtttaaaaaaaaaatagcagggcatggtgacacatgtctgcagtcccatctacttaggaggctgaggcaggaggatcccttgagcccaggagtttgaggctgcagtgagctgtgatcatgccaaggtacttcagcctgggtgacagagtgaaaacctgtcaccttttttttggggggggtggttattgggtttttttgagacagagtctcgttctgtgggccagggctcacagcaacttctgcctcccaggctcaagcaattctcctgcctcagcctcccaagtagctgggattacaggcatgtgccaccacacccgggtaatttttgtatttttagtagagacggggtttcaccatgttggccaggctggtcttgaactcctgacctcaagtgatccacctgactcagcctcccaaagtgctgggattacaggtgtgagccactgtgcccggcctgaagctgttttaaaatatatccacaaatgcttgggcagccccctttcagtaagtggagcctaattctccttcccttcagtatggctagtttttgtaatttgcttctaaccaatagaatatggggctgggcacagtggctcacacctgtaatcccagcactttgtgaggccaaggcgggcagattgcttgaatccaggagtttgagagcagcctggacaacatgatgaaaccccatcactacaaaaaatacaaaaaattagctgggtgtggtggcatgcccctgtagtcccagctactctggtggcggaggtgggaggatcgcttaggttgagagttggaggctacagtgagctgtgattgtgccactgcactccagcctgggcaactgagtgagaccctgtctcaaaaacaaaatgcttttaagccaagtatggcacacagccggcggtcccggctacttcatttttgttgttgttgttgttttgagacagagtttcactcttgttgcccaggctggagtgcaatggtgtgatctctcctcaccacaacctctgcctcctgggttcaagtgattctcctgcctcagcctcccaagtagctgggattgaaggcacctgccgccacgcccagctaattagtagagatggggttttgccatgtatggccgcgcctggccatcccggctactttggaggctgaagccggaggatgccttgagtgcaggaagtccaggctgcagtgagctatgatggcaccctgcactccagcctgggcaacaaagtaagactgcacctctaaaaaaaaaaaaaaaaggcccggtgcagtggctcatgcctggattcccagcactttgggaggccgaggcaggcagatcacttgaggtcaggagttcgagacaagcctggccaacatggtgaaaccccatccctcctaaaactacaaaaaaaatcagctgaacgtggtggcgagcgcctgtagtcccagctactcgggaggctgaggcacgagaatcacttgaacccaggaggtggaggttgcagtgagccgagattgcaccattgcactccagcctgggtgacagagcgagactctgtctcaaaataaataaataaaaataaataaataagccttttaattgtggtaaaatacacatttaccatcttaactgtttaaaactgtattgttcaatagtgttaagtacatttacattgtgcaaccaatctccacaaccattttcatgttgcaaaactaaaatttttgcaaagtaaacacatttttgaaacaaaacaactcccctattcccccctcttctgcagctcctggtaatcaccatcctattttctttcaatgtatttattttactttatttatttatttattttttgagatggagtttcactcttgctgcccatgctggagtgcaatggcatgatctcagctcaacgcaacctctgcctcccaggttcaagtgattctcccacctcagcctcccgagtaactggtattacaggcatgcaccaccatgcctggctaattttgtatttttagtagagacggggtttctccatgttggtcagactggtctcgaactcctgacctcaggtgatctgcctgcttcggcctctcaaagtgctaggattataggcgtgagccactgtgccccacctatttatttatttttattttatttatttatttatttatttatttatttgagacagagtcttgctctgttgcccaggctggagtgcagtggcaccgtgtcagctcactgcaacctccgccttccgggtttaaccgattctcctgcttcagcctcctgagcagctgggactacaggcgtgtgccaccttgtccagctaatttttgtatttttagtagagacggggtttcaccatattggccacgctggtctcgaactcctgaccttgtgatccacccgcctcggcctcccaaagtgctgggattacaagcgtgagccaccgtgcctggccacctatttatttttttgagaggaagtctcattgtgttgcctaggctgtggtgtagcaacgtgatctctgttcactgtaacctctgcctcctggcttcaagggattctcctgcctcagcctcccaagtagctgggattacaggcatgtgtcaccacgcctggctaatttttgtatttttagtagagacagggtttcaccatgttggccaggatgtactcgaactcctgacctcaggtgatcagcccgcctcggcctcctaaagtgctgggattacaggcgtgagctaccgtgtctggcctgttttttattttttttgagacagggtctcgctctgtcacccaggctggagtgttctggtgagatctcagctcaccacaacctctgcctcccaggttcaagcaattattgtgcctcagcctcccgagtagctgggattacaggcatgcaccatcatgcccggctgacttttgtatttttagtagagacggagttttgccatgttggccaggctgatttcgaactcctgacctcaggtgatctgcccgccttggcctcccaaagtactgggattacaggtgtgaaccaccatgcctggcccactatcctctccttccttccttccttccttccttccttccttccttccttccttccttccttccttctttccttccttccttctttccttcctccctccctccctcctttctctctctctctttctctctctctttctttctttctgttgctctgtctccaggctggagtgcagtggcacaatcttggctcactgcaacctccacctcctgggttccagtgattctcctgcctcagcctcccgagtagctgggactacaggcgcacaccaccaagtccagctagtttttgtatttttagtagagatggggtttcaccatgttggccaggatgatctcgatctcttgacctcgtgatcggcctgcctcagcctcccaaagtgctgagatcacacgtatgagccactgcacccggccactatcttattttctgtctctgtgaatgtgactactctaagtacgtcatgtaagtggaatcctacagtatttgtcctcttatgacaggattatttcacttagcatagtgtcctcaagggtcatccaggtcatagcatgcaacaggatttttttccttcctgacccccctttttttgacttggagtcttgctctgtcactcagactatagtgcagtggctatcacagccactcctggactcaagtgatcctcccacctcagcctcccaagtagctaggactacaggtgtgtgccaccgtgctcggctaatttttttttaagttttggagagagagggtggtctcagtggctcccgcctgtaatcacagcactttgggaggctgaggcagtagggggcgggggtggggatcacttgagggtaggagttcgagaccagcctgggcaacagggtgaaaacctgtgtctactaaaaatataaaaattagctgggcatggttgtgcgtgcctgtaatcccagctactcggaggctgaggtaggagaatcacttgaacctgggaggcagaatttgcagtgagctgacattgcgccactgcactccagtctgggcaacagagtgagacttcctttaaaaaaaaaaagttttgggagagatgggggtcttactgtgttgcccaggctggcctggaactcctgggctcaggcaatcctcctgcttcagcctctgggattacaggcatgggattacagtgctgggattacaggcatgagccactgtacctggccagcactttattttattgttatttattattattactttgttttttcataacattgatgttttgaaggttataggcgacctcctttgtagagtgtccctcattttggctttgtctcatgtttcttattattagatttaagttatgcattttggcaggaaaaccaaagaaatggtatgtgtctccctctttgcttcagaccagaggcaactaaggtcaatttgtcctgttaatggtgatattaacttgtatcatctggttaacgtgatgtttgccaattttctccattaatttttttttgttataataagtaatctaggggaagctactttgagactaaataaatatcctgttctttatcaaatcagattttcacccaataacttaatagtttcagtctctgttgacaatccttgctggaatctcgtgatcttttgtttttgtttttgtttttgtttttgagactgggtttcactttgttgcccaggctggactgcagtggcacaatcatggctcactgcaacctccacctcctgggctaaaccaatcctcctatctcagtttcccgagtagcttggaccacagacatgcatcaccacacccagctgattttgtttattttttgtagagacaaaatttcactttgttgccctggctggtcttgaacttttgggtttaagtaatcctcccaccttggcctcccaaagtgctgggattacaggcttgagccaccgtacccagctggaatctcatgtttaatattccagacctgtcacaaacactaagaggtgtagcctcttagactgtacaaggctaacggcagccagagagctctcactggaagtgaattaatctctaggatggcctagagggatgaggggacccacagagctcaatgatttggtgaaaaactgaggctggaggctgatgggaatttatgcccccatcccacacatatgtaataaagacccactttgtgccaggcactgttttaggccgtgaggcacagtagtgaaaaaacgagatcaaatctcagcccttgttgtgccgacactgatgtgggaggattcaaactacaaacaagaaaaatacatggtatgtttaaggccgggtgcagtggctcacgcctataatcccagcactttgggaggccaaggcgggcagatcacttgaggtcaggagtttgagaccagcctgggcaacatggtgaaactccgtctctactaaaagtacaaaaattagctgggcatggtggcaggttcctataatcccagctacttgggaggctgaggtgggagaatggcttgaacccaggagatggaggttgcagtgacctgagatcgtgccactgcactccagccttgctgactggggttttgctatgtcgcccaggctggtttcgaactcctaggctcaagcagtcctccctcctcggcctcccaaagggctgggattacaggcgtgggccaccgcacctggcctacagtatgcttcatagaaatatgaaaagaatgagagcaaggttgagatagaaagtaacagggcatccctcctgagtaaaacaatcctgccccctcacgctctcgtctaccctcccgtgggtctccctgcttctgtcgtctgccagaaactggctgagccaagtgcacttgcagacgccatctgttctccctgggagtggggccggtgccagcgccagcatctggactcttggcaaggagccctggagccctggagcgagggaactccggccccacaaaggccagggaatcctccagtctggtgagacggagggcttctgggaagggaggcctatacaaggctccatgaaggaggtggaagcttgcaagacgatgatagtcttgtaatcagtccgatggagatggatgtaaataataatattaataaacaccatcaaatgtgttcagagtgctttctttgccaggctttggataaatgttggatatctgttctttttattttttatttttctatttcctaggcagcacctaaaccaaaataggttcagagaggctcccaatgttggacatttgttgttgcagcaactctaagtactctacatatgttatcacataagaggcaaggagcattatccccattttgtaggtgaagaaataggggttcagagaggtgaaggcattgtctagaggccacacactcagtgacttaaagagcctggaaaggggccaggaatggtggctcacacctgtaatcccagcactttgggaggctgaggcgggtgggtcacctgaggtcgggagttcaagaccagcctgactcatatggagaaaccccatctctaccaaaaatacaaaattagccaggtgtgatggcgcattcctgtaatcctaactactcgggaggctgaggcaggagaatcgcttgaacctgggaggcggaggttgcggtgagccgagatcacgccattgccctccagcctgggcaacaagagtgaaactccatctcaaacaaacaaacaaagagcctggaaaggaaaccaggtctatgtgggtccaaatgctgactcatgaacatcactgtaccacgtgacaatcagagcatcaccccctactggaccccactcctcagccttctttccctagaaactcctaacccacctgcctctgcttcctcctcacccattggcttagcaagggccacaggaacacagcccggggttacaatatgctgggcttggtaccagctgtttactgtggccaagtgagcatgcaagtgagcccgtttattttcttttctttttttttttttttttttttttttgagacggagtcttgctgtttcccaggctggagtgcagtggcgcgatctcggctcactgcaagctccgcctcccgggtccacgccattctcctgcctcagcctcccaagtagctgggactacaagcgcccgccaccaagcccggctaattttttgtatttttagtagagacagggtttcaccgtgtcagccaggatggtctggatctcctgacctcgtgatccgcccgcctcggcctcccaaagtgttgggattacaggcgtgagccactgcgcccggcccgtgagcccgtttctttatctgcaaaacagggattaaaaacaagccaacaccccttcagcactcctccgcaaaaaaacaccccaaaacaaaataggccaggcgcggtgactcacacctgtaatcccaccgctttgggaggccgaggctgcagtgaacccaggagtctgaggctgaagcgagcaatgattgcgccactgccttccagcctgggcgatcagagcaagaccccgtcttttaaaaaataataataaaaaaaaaatctgccgggcgcggtggctcacgcctgtaatcctaacactttgggaggctgaggcgggcagatcacctgaggtcaggagttcaagaccaacctgaccaacacagcgaaatctcatctactaaaaatacaaaaattagctgggcgtggtggcttgcccctgtaatcccagctactcgggaggctgaggcaggagaatcgcttgaacccgggaagcggaggttgcggtgagccgagatcactccactgcactctagcctgggcgacagagcaagactccgtctcaaaaacaaaacaaaacaaacaaaaaaaccaaagtaaaatagcagcgacaacaacaacaacaacaagaaaaacccggagctgagaggaagaatgaatgcgatgatgaatgtaaagcgtttaacacagggcttgggtacagtctgccctcaatgaaccaatgatgtacccctaggcaatttacctaacctcggcttgccagtttcctcccgcgtgaaacaggacaataaacgattatgcctcttagggttgtgctgaggaatacatgtgtatgtaagtttatttgcaaagcacttagaacagggcgcacggtccttgttgctgttattattattggctattattgcgcaaaggggaagggaggcggggccaagccaggaaggccctggagaatccggggtgccccctcctccggcagagcttgggcctgggctcacgaggaaggggctgcagttctccaaggattcccgcctgctcccagacccccgggagtcgtaggaacccgttcctggacgctgacgtcggctttcagggatccctcgccggacgccgcggagggacagagcctgggaagccgtcgccccgccccgtccccgcccccgcgcgcagcgggcccggggcgctgagacccgcgtagagcaaagcgcaaggtcccagcgccccttggatcctcggtggcagggtccgggcaagtgtcattgcgagggttcaggaagccccggcctgtgatcgtgagcggtgagtgagggacgtaggtgggtgggggtcacagtcccttccctgggtcctggagttggggatgagagggcaaagctttggcgaggaaatcggctcagtcaaggtttggaatgagcaggcaggaggcttggggaccttccagggggatcgtaggacgagaagaagaatattctttctggttgtgttgcgtgtgtacgtgtatgtgtgtgctggggttgagggtgtttatgggggcgaggtgtgcaaaggattctggagagctggtgcatgtgtgggagttgtgtggagtcataggtgtgtgggtggagtagggcaggggtgcctgggcctgatgagtggggcaggcatgccagaggtcatgagaataggagagagtgccggggtgcatgtgtgcgtgtgtgcacaggtgtctgtggtttgtgatgcagtggggagtagggttgtgcacggagtcaattgggataaatgtgtaagaaggttggggacctgaaaggggtgttttctgggagctgatgttttggggcaaatattcaaggagtcctttgggagatgaatgtgtggaggtggaggctgggcttgcctagatggggctgtgtggcaggggacttcggggggcaggtctaggggacagaggatggggaatgtagactagagtgcagttccaggcagcactgggggtaggggatgggtgtgtgtgtgactgggaggggtgcctgggcctggataggtggtcacgcggtatgaacctgggatggatattgggggtgtttgtggggcaggtaagtgtgtaaggcatggtgcaacaggtgctgcaacttattggggtaagtgtgatgggtatgtggcttttgcctgagagaaatgcccagaatttggctgggtgcggtggctcacgcctgtaatcccagcactttgggaggccaaggctggtggatcccctaaggtcaggagttcgggaccagcctggttaacacagtgaaaccctatctttactaaaaatacaaaaaaaaaaattagccgggcatggtggtgggcgcctgtaatcccagctactcgggaggctgaggcagaatggtttgaacccgggaggtggaggctgcagtgtgctgagatcatgccactgcactctagcggatctgcagtggtggatctgcctgggcaacagatggagactttgtctcaaaaaaaaaaaaaaaaaagagagagagagagaaatgcccaaaattgaatgtccagacccctgagttctcttcataacctgaggccaatctttttttctctctgggcctcagcttctgtatctgtaaaatgggtctgaggaccactgcactaactagtctctgcctgagtctctctaaagcaaggggtcagaggttgagtgaagtgagacttttacaacttgtctttttcttccccctacccctaggaaacccctcctggagtttccccaaagccatggacagccctagtcttcgtgagcttcaacagcctctgctggagggcacagaatgtgagacccctgcccagaagcctggcaggcatgagctggggtcccccttaagagagatagcctttgccgagtccctgaggggtttgcagttcctgtcaccgcctcttccctccgtgagcgctggcctgggggaaccaaggccccctgatgttgaggtaggaaacagcaggccttagtggaaggcacgggagggggctggggtgagccccactaaggccagcatctggcaggttgacagctgtgccgatctgccttaggcctggagtctcacttcccagctgtgtgtgggcttctgagatttccagttacggttcttcttgttttatgtctctcatctttgttgcctggcttttggctctgtcttccctctgatctcagactccgctggttggtgtcttcagagtgcatgcacctctggcttttgtccaccctgctgtctccctctttgtgtgtgtgtgtgagagagagagagagagagagagagagagacagggtctcgctctgttgcccaggctggagtgcagtggagcgatcatagtttactgcaaccttgacctcccgggcttaagcaatcctcccacctcagcctcctgagtagctgggaccacaggcatgtgccaccatgcctggctaattttttggtgttttttgtagagaagaggttttgtcatgttgcccaggctggtctcaaactcctgagctcaagcaatctgcctgtcttggcctcccaaagtgctaggattaaaggtgtgagccaccatgcccagccttccttttttttttttttttttttttttaagttactgttgtcactttttataatttctcattccaggccaggcacagtggctcacactggtaatcccagcactttgagaaggcgaggcaggaggactgcctcgcccaggagttctaggctagcctgggcaacttagtgagactccatctttatttttatttaatttttcattttgtcctccgaaaattagaaagaccccatcttaaaaaaaaaaaaaaaaattagccaggtgtgatggcgtgttcctgtagtaccagctacttgggaggctgaggtgggaggatcgcttgagcccaggctgcaatgagctgtgatcataccaccttactccagcctggacaacagagcaagacagacagaaagaaagaaaaagagagggagaggggggagagagagagagagagaaagagagagggagggagggaggaaggaaagaaagaaaagagagagagaaagagagaaagaaggaaggaagaaagaaggaatgaaggaaacaaggaaaggaaggagggaaggaaggaaggagaaagcagaaagaaaggaaggcaggcaggcaacaatcatgatgaactcttacggtttctgttggtcaggaatttgggacttagttgcatggttctgcctctggatctttcttgaggttgcattcagctggtgggtggaactagaacagtcaggggctggctgggcacttttctctctcttcatggtgtcttagggcttcctttttttttttttttttttttttgagatggagtttcacccttgttgcccaggctggagtacaatggtgcaatctcagctcactgcaacctccgcctcctgggttcaagcaaattcccctgcctcagcctcctgagtagctggatttacaggcatgtgtcaccatgcccagctaattttgtatttttagtagagacagggtttcactatgttggtcaggttggtctcaaactcctgacctcaggtgatccacccacctcagcctcccagagtgccagattacaggcgtgagccaccgtgcccagccgagtcttagggcttctatgtggtctctccatgtttgctgccttgggattccttacagcataacggcttcagggcagtcaggcagcttatgtacctccagcctacagcatgaatattgcagcaaagcagaagctgcctcaccttttctgatttcgctttggaagtcacgtaacatgacttccaccacattctattaattacaagtgagtcatgagcctgctcaaattcaaggggaggggacacagaactcatcccttgatgggaaggatatcaaagtcacatggtaagaaaagcatgtggggccgggcgctgtggctcatgcctgtaatcccagcactttgggaggccaagacaagttaattgcttgaggtcaggagttcaagaccagcctgaccaatgtagggaaagcccgtctctactaaaaatacaaaaattaggccaggcgcggtggctcacgcctgtaatcccagcactttgggaggctgagacgggcggatcacgaggtcaggagttcgagaccagcctggccaacatggtgaaacccagtttctactaaagaaaaaatacaaaaattagccaggtgtagtggtgcacacctgtaatcccagctattcgggaggctgaggcaggagaatcacttaaacctgggaggcggaggttgcagtgagccgagatcacgccattgcactccagcctgggcaacagagtgaaactctgtctcaaaaaaaaaaaaaaaaaaaaaaattagctggccgtggtggtgggtgcctgtaatccccgcttttgggaggctgaggcaggagaattgcttgaacttgggagatggaggttgcagtgagctgagattgagccactgccctccagcctgggcaagactctgtctcaaaaaaaaaaaaaaaaaaaaaaaaagcttaaaaatctaaactctagagttttcagcaggcaggtttgccctaatcatttaggccactggagcattttataatctccatcttttatttatttatttattagtgacagggtcttcttgctccgttgctcaggctggggggcagacatgtgatcatagctcactggagtctcaaactgctgggctcaagccatcctcctgcctcagcctcccaaagtagctgagactacaggcacaagacaccatgcctagctaattttttttttttttttttttgagatggagtctcactctgtcgcccaggctggagggcagtagcgcaatctcggctcactgcaagctctgcctcccgggttcatgccattcttctgcctcagcctccagagtagctgggactacaggtgtgtgccaccacacccggctaattttgtttttgtatttttagtagagacgaggtttcactgtgttagccaggacggtctcgatctcctgacctcatgatccgcctgccttggcctcccaaagtgctgggcttacaggcgtgagccactgagcctggcccatgcctagctaattttaaatttttttttgtagagatggggtcttgctgtattgcccaggctggtctcaaactcctggcttcaaatgatcctcccgccttggcctccctaagtgttgggatgacaggtgtgagccactgtgcccggccaataatctccatctttttgcaggttccttgtttcagtggtgtttgtccctgctcaggggcttttctttttttgagatggagtctcactctattgcccaggctggagtgctgtggctcgatctcagctcactgcaacctccacatcctgggttcaagtgattctcctgcctcaacctcctaagtagctgggattacaggggcataccaccacgcctggctaatttttgtatttttagtggagatgaggtttcaccatgttggccaggctggtctcccaactctcgacctcaggtgatccacccacctcggtctcccaaagtgctgggattacaggtgcaagctaccacgcccggccatgcgggggcttttcactcagagattgtaagcaattgtagcgtccatgattggatccgtcaaccccttgaaaatgaactgaaaactctgggtgtgggtggggctcttctctggagacctgatccacaacttcccttcaaagggctccaggatacaaatgtcaaaagcccatctctggccaggtgtggtggctcatgcctgtaatcctggcactttgggaggccaagacgggtggatcacctgaggtcaggagttcaagaccatcctggccaacatggtgaaaccccatctctactaaaaatacaaaattagccaggtgtgatggcgtgtgcctgtaatcccagctactcgggaagctgaggcaggagaatcatttgaacccgggaggcagtgagccgagactgtgccattgtaccccagcctgggtgacagagcaaaactccgtctcaaacaaacaccgaaagcccatctctgaacacttttttctctttgtatctctggggaagccctaggggcaggtattggcctttgagggctatggagagcagagcaatggggcaggaaaggtggatggagatgcccacctgggcactttcctgtccgtaggacatgtcatccagtgacagtgactcggactgggatggaggcagccgtctttcaccatttctaccccacgaccacctcggcttggctgtcttctccatgctgtgttgtttctggcccgttggcatcgctgccttctgtctagcccagaaggtcagtctgtgtgtgggacttggaggggactgggcataaaagagaaaaatgcaccacaaaaacaaagagccatatacctgaggcgggaaggtggaaggtagcccagagaacctgaactcaaatcctgagtctgccactctctgcaagattttttttgagtctcactttgtcgcccaggctggagtgcagtggtacaatctcggctcactgcaatctctgcctcttgggttcaagtgattctcctgccccagcctcctgagtagctgggattagaggcgcgcgctaccatgcctggctaatttttgaatttttaataaagacggggtttcaccacgttggccacgctggtctcgaactcctgacctcaagtgatcctcccatcttggcctcccaaagtgctgggattacaggcgtgagccacggtgcccagctctctgcaagattttgggcaagtcacttaacttccctgtgcctcactttcctcatctgtaaagtgggaataattgctacctctgggtcaatgtgagaatcaaatgagttagaatagtggcatataccattttaatgtttttatttattttttaaaatttattattattattattttttaccattttaatgtttttattaaccactcagcatccccagtgcctgacctatagtaggtgctacgtatctgcttttggaatacatgcatgaatgaatgaatgggtatgttgggtgggggagggaccaggggaagggtctgggactgaggggatgcctgggtcactgctgcccactgcctctacagaccaacaaggcttgggccaagggggacatccagggggcaggggccgcctcccgccgtgccttcctgctgggggtcctcgccgtcgggctgggcgtgtgcacgtatgcggctgccctggtgaccctggctgcctaccttgcctcccgagacccgccctagttgcccctacagccctcactgtgaaccctgaggccggcagcccagcaaatctgtgggcagagagtggagaatcttggtggatgaggctgcggcggcggcaggagcatctagaaacgggagcgagctggactggaacccttccccttcctggccaccgctcttcgggcggcagcaacctgagattaaacaccagacacccttgcagccaaaccagagtctgttcgcgtgtgtgggaggatggaagggggtgggggtgcttgagaccaacaggggactgactggtcagggtgacgggctgtggtgggcatccccagggtgcttgctccctgagacctgagctggaaaagggggaagaggattttcgggttttttttgttttttgagagatggtctccctgttgcccatgctggagtgctgtggcacaatcatggctcactgcagccttgaactcctgggctcaagcaatcatcctgattgagcccaggagcctcccaagtagccgggactacgggcacctgccaccacacccagctaattaaaaaaatttttttgtaaagacaaggtatcactatattgcccaggctggtctgaaactcctgggctcaactgatcttcccgcctcggtctcccaaagagctgagattacaggcatgagcgaccatgcctggtggtttctaaacagcaggatgttctcatcccaatatgggtggttagcagagaactggagagagctgagtttcaagtccttactcctctacctgttagctgtgtaagcttggcccaagtgacttctcactttttctcctctgcaaaatgggactttctgcacacctcaggctgtagtgaggattaaatgcatcatatgtggaaatgactgtctgctgttgctgtctccctctgagcttttttttcttttcttttcttttttttgagataggatctccctctgtcaacccagactggagtgcagtggcccgatcttggttcactgcagcctcgaccttccaggctcaagtgatcctcccacctcagcctcccaaggagctgggaccacaggcgtgtgccacaatgcctggctaattttttgtatttttttttttttttttgagatggagtctcgctctgttgccaggctggagtgcaatggtgcaatctcaactcactgcagcctctgccttccaggttcaagagattctcctgcctcagcctcctgagtagctgggatttcaggtgcgcagcactgcgcctggctgatttttgtatttttagtagagacaggttttcaccatgttggtcaggttggtctcgaactcctgacgtcaggtgatccacccacctcagcctcccaaagtgctgggattacaggcgtgagccaccaagcctggtctttattgcttgataatgtctagcccctcttagtgtgcttagtgagcacttcctatgtgcctctgctaagtgcttgtgacagatgtgttttccctgtccaggtgccaacacctccatgtttccttaaggatgcatccctttccctattgcaggccatttggtttggatgggactgcctccaactgcaggtagggttttgccccatctctactaaaaatacaaaaattaggctgggcacagtggctcaagtctgtaattccagcactttgggtggccaaggcaggcgaatcacctgaggtcaggatttccagaccagcctggccaacatggtgaaaccgcatctctactaaaaatacaacaattaggccaggtgcggtggctcacgcctgtaatcccagcactttgggaggcagaggtgggcggatcacctgaggtcaggagttaagagaccagcctgaccaacatggagaaatcccgtctctactaaaaatacaaaaattagctgggtgtggtggcatgtgcctgtagtcccagctactcaggaggctgaggcaggagaatcattggaacccaggaggcggaggttgcatcaccccattgcactccagcctgggcaacagagcgagattccgtctcaaaacaaaagaaaacaaaacaaaacaaaacaaaacaagacagggactataacaacagccccatctcacagggttggtgggtgggtatttagagtttcctccccatggcctacaaggccccacctgcatgcttgcccgtttcccccagccccatctgctctcctgctctagctcgctggctttggccaccctgttcaccaagctggtccccagcccctgggggctccttccccacattatccaagagctcactccctttcctctttcagggtcccctctgaggtaccctgctctgtgaaggcactgatgcctgatgtactcaatttgccctccataaagggactctcccaaactcctgttccctgctttttactttttcatagatttactaccatctgacaaattccagtttacctccctgctcctctgggatctcactagcagggcctgcacacgatgggtgctcaacagacatttgttaaagtgaattaatttattgattcatccattccataaatgtgagctcctttgaatgttatccttgctggggggatctgtgcccccaggcctgggggctgtcacaggccaaggcctccccacaggagccctgtggttacagagctgcaggctcaaggagcccatgggtcagagaggcaaggctgggctgctggtttgcttcaggctgtagggggtgagtgggtggaggcaatgggagcggccccttgccccagcttgcctcagctcttggagtaacgcctctgcagcgattcccggtagaaacggaagacgtgttgcgaagcggcctgggccgcagccaggcactgctggagctgcgggggagagactggtcggtgctgggggccgagcccttcatgcacacacgacttggctgacccaggaggttctgctgaccccacctgactcccttaacctcccatcactcccctgcccccaagtgaggcaagtggtaagggattatttcccatttcatgaactgtttcttagagatcaggagaaataaaaagagggagaaggacttcaggatcagattctgacagcaacaggactcagacctatcaggcatcctcacaccttggaggaggccccagctgtgcagagctatggaactggagagtgcacagaattggagtggtcttgggattttacagccacagtccccttcagcccaaataatctaagagccatggaatcaagagactcccagtcttcactgccatgtattcctagattcatgaggtccaggttggacatgcttttgcagacagtcatgtccaagagtttccaggctctgccccttagcctgagacctggaattcccatggctcaccactctgagctgggagctgggggaccatcacatgccctcttctgacttcaaactgagctcatcctctttttgcctgtgttataaattgggcttcccttaaacatttccgcaaaggtttctgggtccacaaagtttgaaaactccctttttacaagaagaaatttaagaggctctcctgaagcctctcagaatccagggcagagttgggacaagaccgtatgtcagtgggaaggaaggttctggcttttcccctcatccccatgctggtacctcagtgtctgagtagagccccttggtgctggacatcagcagcttccgttccacgctgtccagggcaaaggtcaggactgcccgggcctcctagggacaaggggtagaaggcggtgggggacctaggaccttcccctcagataaaatctcagccagtcctttggccaggcacagtggctcatgaccataatctcaccactttgggaggccaaggcagggcactgcttgaggccagaaactcaagaccaatctgggcaacagagggagaccccatctcagaaaaaaaaaaaaaaaaaaggtagctgggtgtgggggtgcatgtctgagttcccagctactcaggaggcagaggtgggaggactgcttgagcccaggagtttgaagctgcagtgagctgtgatcgtactacactccagcatgggcgacagtgagaccctgtctcaacgctccccttcccaccacacacttgcagccagtcccactgaggggactccggacccttggcctccaggcctctccctttccatagccaggcgctcacctatcaagcatcaagcgcagccattttttgtctacgctaccccttccctacttccctgggtatagccctctgcctttcctttgtagaactgtactccatgccccttattccaaccacgtggttctgacaggggcttccaagctcagtattcctgccccaaggggctagccatagtgccactcacttatctggtacctctcggcctcccagtcccccttccatgctctgtcccacaggggctggaagccagcaagctgtatttcccagactcccttaccagctagtttccatcagtaatgaggtgggagaatggaagaaaagcagcaccctggtcctcatggacaatggcaggtgctgatggctgtggctgtgtgacagccatggaggtggggtgggttctggacctcagtggccagggcagaagcaggacatgctatgtgcatccagaaccaattgagatgatgtctccaacacgacagaacaggaggtggctcgcaggttcagtccaggtctgggaggggtttctcatctctgggtgtcactcctgcttcctttttcctcctctagttcctcaacactgttgttacaaagtccctgcatttaactccctccatctgaaaccctccaagtggtttccgtcttcttgactagaggggaccattatagcactgggcagaaaactcagaataacttgagcttaggacactgcacctgagccgatgaggaaaactctcttctcgtttgcttttgagcctcctaggatggaaatggagcttaaggggtcagtcccagcctcaggaaaggtgctggccagaaagaatgaagctgatgtgcagagaaaggcagggacgagaagtgaagcaaggacatcctgatggtgtttaaagtcctggttttattttattttatttttgagagtttcactctttcatccaggctggagtgaagtggtgcgatctcagctcactgtaacctccaccctccaggtttaagtgattctcctgcctcagcctcctgagtagctgagattacagatgtgtgccaccatgcctagctaacctttgtatttttagtagagacagggttttgcaatgttggccaggctggtcttcaactcccagcctcaggtgatctgcctgcctcagactcccaaagtgctggcattacaggtgtgagccaccacacctggccatacatttcctttctagtttatttatttatattttttgagatggagtttcactcttattgcccaggctggagtgcaatggcgcgatctcggctcaccacaacctccgcgtcctgggttcaagcgattctcctgcctcagcctcctgagtagctgggattacaggcgtgcgccaccacacctggctaattttgtatttttagtagagatggggtttctccatgttggtcagactgatctcgaactcccgacctcaggtgatccacccacctcagcctcccaaagtgctgggattacaggcgtgagccaccgctcccggccccacatttccttcctaattaagcaagtctgagctgggtttccagcacttgctgctaaatgaaccatgatgattagagcagcccttgctaagtgggattgaggtggcatgagccgactgtctgtagagaagcgaggcctggaggaagggacgggcagctgtctggcctctgcccttcagccaccctggtcttcacacctaccttttcttgcttggatgtaggatccagcacgagggtcccatcagagtccagggcgcaggcgaccccacagaagagagcccgcatgggcacacctgcatccaccaatgccatgcaggcggcattcagacaacaggccaggagctgagcaccacaggaaatggttaagtttcttttttttttttttggagatggagtttcgctcttgttgcccaggctggagtgcaatggtgtgatctcggctcactgcaacctccacctcctgggttcaagcaattctcctgcctcagcctcctgagtagctgggattacaggcacccaccaccacacccggctaatctttgtatttttagtagagatggggtttcactatgttggccaggctggtctgaaaactcctgacctcaggtgatccacctgcctcggcctcccaaagtgctgggattacaggcatgagccaccacgcccagcctaagaagtttctactgtaggcctggccagcagagcagatccatgcctccctccaccaggctgatgcctatggcagacatcactaatcggtcacagaagggcagtatggcagagtggttaaaagtggtccggggatcaagtagccctgggttccagacctagttttgctcagctgtgtgaccttgaacaagtgacttactccttgagtctcaatctcctcatctgttagatggggaatataataatattcaataggtatgtactgaagtacgtaccacacatttgttggcaaatagggtcagagaggggaagaaaccttccaaagacacgagggggaggcactggcaaagccaggcccgaaacttgggtagcagccactccccggtgacagagctggcagggcaatggaggaagagccacctcgctgctgcctgcaggaagctcacagtggaaagagagcacaggttgggagtcagctggctctgcctcagtttcctaatgtgtttcttctccaggcctagcagccagacaaagaccacagctttagtcaaccggttccagctctgctgctgatcctccacgccttcctctgggcttcactttccacttctgtaaaatggggtcacaataccttctctctctgcccatccataaaatgtctgtccagttcagggccacgttccagtaaagccttctacagtgtctaattctagtcctcaacctcaacctctcgcacctcagacatggagatcttacaaggccacgctcctgactcagctgctgtctgctcagggcgcccccagcactgagggcctgaaatccactgaggtgccgagtagaagtgattgccagccgggcacagtagctcatgcctgtaaccccagcactttgggaggccaaggtggactgatcactcgaggtcaggagttcgagaccagcctggccaacacagcaaaaccccgtctctactaaaaatacaaaaattagcctggcgtggtggcaggcacctgtaattccacctgtaattcaggaggctaaagcatgggaatcgcttgagcccgggaggtagaggttgcagtaagctgacattgcaccactgcatccagcctgggtgacagagtgagagcctgtctcaaaaacaaacaaaaaaacccaaaaaacaaaagaagtgattggcacaggctctggagtcagactggcctgggcttgagtcctgcctgtgctgccttccagctgtgtgaccttgggcaagccccttcccctctctgggcctcagttttgtcacctgaaacatgcgaacataagaacactcatctgccagggtccgtgggctctagaactagacggtctgggtctaagtcttggctctgccacttccacggggatcataagggcatgtgctatattacatgagttaatgtgcataaggcacacagaacagtgcctggcacataagtaagcacccaggctgtttgctctccttcttcagtgagctggtacctgtcaagtgtttgaaggctttctggctagcagtgagggtatatgtatccgccaggagggaagcaatcaggagacttcctggaggaggaggcctggcagaaaggatacagagccggcatcgctgacaacctgcagcaccacggtgatggaggtgcgggggtgcaacgtgcccagcaccaccgcctcgcacgtgttcctgatcagccgctcccggctcttctctgcaacacctggggaaattgaagagaggttcagggtcttccccttcatttgactcaccttcctccatacgcctcacccaaattcccagaaagggctcacggtctcagcctgggatggtgcagttacctgcagggatgatggaagattccagtgggaagaaggcaaggcctgactgccatccactgacccctgctacctccagcatccaccaagggaaccatccaagggaagaagacctgggagttccatgtctgtgctgctacccacgcccactcccaccctagcaggtccagtcagtggggactgagggatatgagggtaaaagggtggaaaaacaggttaatggtccaggcacagtggctcgcgcctgtaatcccaacactttggggggctgaggcgggcggatcacttgaggtcaggagatcaagaccatcctggccaacatggtgaaaccccatctctactaaaaaaatacaaaaaattagtgggcatggtggcacgtgcctgtaatcccagcgactcgggaggctgagccaggggaattgcttgaatctgggaggcagaggttgcagtgagctgagatcgtgccactgcactccagccggggtgacagagcgagacactgtctccaaaaaaaaaataaataaataaaaataaataaaagaaaaacaggttaatggaatgaatgagagtggaggcagagagagggagaaaagagggagggagaaattagaggcagagagagaagcaacagaagatgagttattaattagaggcggagagttaaagacagaaacagctgagtggagacccaagcggggagtggagactcggggcagctggtagggaggagctgggggggtgattttgacaaactgggcaccactcagaggttcagcagggcccaattaccaggcagcccaatcttcggcctcaggatcacttcgagtgtggccttgttgaaaatctctttgctgaccttcacctcggccggcccgtacacacccgccaggacagaggtgtcacctgaggagacagcagggagggcctcactcacagcttccctgctcctggggccccatttgtggcactgagcctgacggccagggctccccacgtcacccccgccatttgttggtactgattctttgagcactcacttcatttctctcatttgtaaaatggggaaaatagcagtccctccccgctagcgtcttgtgaggatcaaaggacacaattcacagaaaacacttagaacactgcggggctcacgctgaatgtgcaacagactttagctgtattagtaacattcgtccattcaggcattcaggcagggtctcactctcattgcccaggctggagtgcagtggtgccatcacggctcattgcagccttgaccttctgggctcaagtgatcctcccgcctcagcctcccaagtagctggaactacaggcatgtgccaccatgcctgactaatttttatatttttagtagagaggggattttgccatgttgctcaggcgggtttcgaactcctgggcaactgtaatcccaaggtgctaggattacaggcgtgagctaccacgcctggccctgatattagtaatttttttttttttaatgagatggagtcttgctctgtcgcccaggctggagtgcagtggcgtaatctcggctcaccgcaacctctgcctcccgggttcaagcagttctcctgcctcagcctactgagtagctgggattacaggcgcgcgccaccacacctggctaatttttttatttttagtagagactgggtttcaccatgttggtcaggctggtctcgaacttcctgacctcatgatctgcccgcctcccaaagcgctgggattacaggcgtgagccactgtgcccggctggtattagtaacttttaacaggaagttcttcctgaaagctaaccatcctccctcttactgcagctgctctcaacttctctttccaaagcttccccagcccagctcttcccttaggcactggcccccaaattttgcatcagtctggacacctgagaaagggataatatctggaatgaatcctgattccttatttccccagaagctatgaacggggtacaggaggtaaaacctaagaaataaacagcctggcttctagtactgtctgctgtaatcccagcactttgggaggctgaggtgggtggatcacctgaggtcaggagtttgagaccatcctagtcaacatggtgaaaccctatctctactaaagatacaaaaattagctgggcatagtggtgggtgcctgtaatctcagctacttgggaggccgacgcaggagaattgctggaaccggggaggcggaggttgcagtgagccgagatcacaccattgcactccagcctggacaataacagcaaggcttagtctcaataaaaaaaaaaaaatacattttaggccaggcatggtggctcacacctgtaatcccagcactatggaggcccaggtgggaggactgcttgaggccaggagtttgagaccagcctgagcagcataggaagactcctgtctctattttcttttttgggacagagtttccctctgtcacccaggaggctggagtgcagtggcgcaatctcagttcactgcaacctccgcctcccaggctcaagtgattcttgtacctcaacctccagagtagctgagattacaggtgcgtgctaccacatccgactaatttttgtatttttagtagagatgggttttcaccatgttggccaatctggtctcagaactcctgacctcaaccaagcgaggtggctcacgcctgtaatcccagcactgtgggaggctgaggcaggtggatcacagggtcaggagttcaagatcagcctggccaacatggtgaaaccccgtctctactaaaaaccacaaaaattagccgggcgcggtggcacgcacctgtggtcccagctactcaggaggctgaggcagaagaattgcttgaacccgggaggtggagggtgcagtgagccacgatcacttcactgcactccagcctgggcgacagggcgagactccatctcaaaaaaaaaaaaagaaaaaaaaaaaaagaactcctgacctcagaggcctcccaaagtgctgggattaccgctgtgagcaactgcacccggcctcttcttaattcttacgttcgaagaaactttaggtatctcaattcagcataagcgctaagcctgagggagggcctgggaaggtccttggttaaggccgtatttcctgggaagcccaatttgcccttacacggaaggtatgcttagttccaggagaaactgccctgaggactggagaagttaccaaaacagaacttgcctctggctccagatgaactgcctgtgttttgcccgagcacaagagtctctcccctctcaccttcttgaagacgtggctccagcaattctctcccctgttgaccccacaacaatctacaactcctgccccacttatctgatcctcttacagcagaactcctgaacagctgcctcttcttccttttctgtgaccccaccactccattgcggcagctcaacatcgtcaccactgacctccaaatgatcaaccctcccatgacccggctgtcagtaaggctgaaacagctggtcagccctcacatctcagacatgctcttttcttggccccaggtcaccaccatctcctggtttccccctaactctctgggcgttccttctgagtctcctttgctagcttgtcacatgtctctgactgctcaagttggaaggcctagggcttggtcctgggacctcttctcttttccatctacactcacttcgttcaggcaatagcctgaaataccatctatatagccagagagttccaaattgcctatgtccagcttgggtctctcttctgatttccagacttgtacagatctgggcagaaaccttagttatgcctgaatctttttcctcgcactcaaaccaaactatacgtaagttttgtccgtattactttcaaactacatccagaatctcatcacctccactactcctgctctggctggagccaccatcacctccctgttttcccccatactccccacaatcaacacagcagccaaattttgttaaaatgtattggggctgggcgtggtggctcatacctgtatgagcactttgggaggaggattgcttgagcccaggagttcaagaccaacctgggtgacatcgtgagacgctgtctcaattttttttttttttgagacagagtcttgctttgtcgctcacgctggagtacaatggcacgatctcggcccactgcaacttctgcctcccaggttcaagtgattgtcctgcctcagcctcccgagtagctgggattacaggcgcccgccaccatgcctggctagtttttgtatttttagtagagacagggtttcgccatgttggccaggctggtctcgaactcctgacctcaggtgagccacaggtcttggcctcccaaagtgtggggattacaggcgtgagccaccgcccccggcctcccgtctcaaacgttaaagagaaatattcttggagttaatctacttctgagagttatttagctaggaaaaggggatatttgctctataggtaagacttgccctaatcttttttttttttttttttttgacttgccctaatcttagggatatttacttgtgtggagagatgcagtgaggtagcggtggggatgtatttctcaacccagcgcaatgacattatcttcaatttgaggagtatttacgtgggtgaaagatccgccacagtccacagtatgcaaatagacaggtttgcttcagtccgggatgcaaggacctagagggtgtgtgtgtggggggtgggggtgggagggtggaggaggaatcgagttaagggggatatttaccctggcgaggtgattttccctattctgaaatatcaattcttgggcggacagtctgcccctcctctcattctcagagatagttacaaagatggaactatcttctcctttctagtcgtgagggagagatgtgtgtatccctgcgtatttagtagtattcaatcggacaagaaatcatgcatcaacgcaggagtgacatttaccagctggtatcgtgaggaggtgggcactcggttgcacagtacacggtagtccctctccaaaagaaagacctgggtgaagttcttaccttgcaggaaggaagcagagccatctggccgcgacagcaggttctgttcgcaggcaaagtgccggaggctgcagccaggaccccgagggctggaccctgttccattttcagcacggattttggcgtcagtatgcgtctcctcctccatcgcgccgagcccacgtgcggctgcagttgtcacttccgcctggcagcgcgcgccgcaaacaggctgcgtaaccagtgcgcacgcgccgggctgggccatcctcctgggcgtccgcacgtggcttagcgtttaccaacaatctggctccgcccagtcccacctcctaactctggcaacgccattggacatttgggaacagaaggcaggccttggcattgatccgctttactctgggcccccgggccctaaatccctgaggccctggtcaggttgccctcttctttgcctgttacaggagtaactacaatgaggcgattggagaaaattttgggtagatagatttttttttctccaaatctctgtgcattctatctaccacagaacgggaagaagatggttttcttgtcagatggtgctggagtttgcgtcaggcacataaagaggcagccccgaatctagcctacgtgagtgccggaccgctgagtggttgttagccaagatggcggtagcgatcgctgcagcgagggtctggcggctaaaccgtggtttgagccaggctgccctcctgctgctgcggcagcctggggctcggggactggctagatctgtgagtacctgggccccaggcggttttcccaaaggggattagggatgtaaaggctatcttcagagtgtggggtccctgaaggatatgaaggaagggctgtcacaaaagggaaaaagagtgggagactccttggagaagacaccgaagggaagatctgccacttccttaggagacgaaaagaacttccacttctttaggagaggaaaaaacccgtttgcaacttctttgtgggccctgagggagacgacttgaagagagagatgggggttccttattagctgccactggtattcaggggaggctccttggaggaacaggggaagaccgcaagaccttctccctcagggtttggagaatgaaactgactttgtaagggagggactttcttctgggcaaagatccctcttcaagaagaagaaagaagagaacaggtccctgtcacaggctgcatagggccttgtatttctttgctcctttgccacaattctgattttaaaatgaattgtgtaaaaaatttgtttgattcctgtgtctcttgatcgaatatcaagacagagaattcgtgtgttctggacactgtacagaggagacgattaatatttgttgaattaatgaggggaaaaaaggagggagagaggtacagacagggcactttgcccacatttcttagaaacacttgagaaggctttgtttcttgtcaaaagggtcacaatcccttcaggtggatgctgctaagggcaagattacactgcaaaaaacctaggtggaagcctatctttagacggggagaggcaatgggttgcagaagagctttgaactacagttgacagataggagagtagtggttacatgggtggatgcatgtccttgctctgccgctttccacttgtgtagccttggccaacggactgcacttctctggatctatggagctaattttcctctctaaaatattaacagtggccacctcatagggctgtgaaaaatcaatatgtaaaatgctaaggactggacctggcacatcctaagggcaataggaatgttgatagtgagggtggagggaagggacagaaactaaccttggagatggggagaagaaaggggtgaccttgggaaggcctggattggtgaggccctggggaaaaaaatctgaaaagatattgtgaggttgagtctgatcctctgatccccaatccataaggaggggaagatggaatctgtagaaagaagctctgggtaggggaacaaacgggaggagggtgaagaagatgggccaggagtaggacgtagtaggtatctaggaacggagtcacttgaaacaggtaaatacagaagggctgcaggagcaaggtgtgggtagggcagtctcttgcctttgggctggagaccttttcacttttttttttttttttttttttgagcagttcatatcctccacagctgatctcagtcccaggggcccattggctgggcaagtggggcaggaggtgggcaggactggggcaggctagggaaaggtcatttatggctgattaaatctttctctcctgtctcaatctcttgattacctttcctcttgcttcccctacttcatttttggtggggagtggggagggaagaagtccctactttttatttatatatatttaaatttgtattatcttaagagttattgttttttcccctttatttctcccacctgttctttctctcttcttctttctttcctctccttctcctctcctctcctcccctctcctttttcttttcttttctttttccctttcctttcctttccttttctcttctcttttctctctctctttctttctgtacctctctttcctttttctttttttttcttttttgagacagagtttcactctctcgcctaggctggagtgcagcagcatgatcttgacttactgcaatctctgcctgccgagttcaagcaattctcctgcctcagcctccctagtagctgggattacaggcatgcactatcacgcctggctaatttttgtatttttggtagggacgaggtttcaccatgttgtccaggctggtctcgaacttctggcctcaagttccgcctgtcttggcctccaaaagcatgagccactgcgcctagccttttctttttttgagacaaggtctcactctgtcacccaggctggagtgagtgcagtggtgtgatcatggctcactgcagcctcaacctcctgggctcaagcaatccccccacctccacctcctaagtagctgggaccacaggcacgtgctactacgcctggctaatttttaatttttttttttttttttgagacggagtcttgctctgtcacccaagctggagtgcagtggcacgatctcggctcactgcaacctccacttcccaggttcaagtgattctcctgcctcagcctcccaaatagctgggactactggcgtgcgccaccatacccagttaatttttgtatttttagtagagatggggtttcaccatgttgaccaggctggtcttgaactcctgatctaaggtgatctgcccgcctcggcctcccaaagtgctgggattacaggcataagccactgtgcctggctgcgcctggctaatttttaaatctttgtagagatggggttttgccatgttttccaggctggtcttgaactcctggactcaagcgatcttcctgcctcagcctcccaaagtgcaggatgacaagcgtgagccaccttgcctggccatattattaaattatcatgagtttaagtttaagtagccacaagtgggctgggtgcggtggctcatgcctgtaatcccagcattttgagaggccaaggtgggcgggttgcctgaggccaggagttcaagaccagcctggccaacatggtgaaaccccatctctactaaaaatacaaaaaaattagctgggcgtaatggcgtgtgcctgtagtcccagctacttgggaggctgaggcagaagaatcgcttgaacctgggaggcggagattgcagtgagccgagatcgcaccactataccccagcctaggtgacagagcagccctctgtctcaaaataagatagccacaagtggttggtggctgccacattagatggtgcagggtttttgttttgttttgttttttgttttttcgaggtggagttttgctctcattgcctaggctggagtgcaatggcatgatcttggctcaccacaacctcctcttcctgggttcaagcgattctcctgcctcagcctcccgagtagctgggattacaggcatgcaccaccatgcctggctaattttgtatttttagtagagacagggtttctccatgttgatcaggctggtcttgaactcccgacctcaggcgacccacccacctcggcctcccagagtgctgggattacaggtgtgagccaccatgcctggctaagatgatgcagttttatccaggtggagatgaagaaatagtcagggaaaggttgagaggctgcatattgtagacagattggattactgggttcactggggaagattggattagaaggaggagtggggctgctttacttgtccccgacttcttgcccctgctctgcccactccttcattgaataccctgctgccctgcagatgtgtttgcctgattttcacctcccttcctgtctctgttatcatagcagacgttttagtgctcagggaaaggaggaggaaggaaactcagattgtcaaggaattgtgagtcagtttctcagccactaccccaggcctgggcttggctaagtcatttcacctctctgaccctagctagtggggtgaatagagtccctaccctgttggaagtcaggaagcccctggagctcgctctgtgctaattatcggtgactatttctgtgacccagctcttcaggggcagcctgtctgggggttccagtgccctgtgcagtatctccaagtggtaggtactcagtgtatgtattagtccgttttcaggctgctaataaaaacacacccaagactgggtaatttataaagaaaaagaggcttaatggactcacagttccacatggctggggaagcctcacaaacatggcggaaggcaaatgaggagcaaagtcacatcttacatggtggcaggcagacagagtgcttgcaggggaactcccctttataaaaccatcagatctcgtgagacttattcagtataatgagaacagcacgtgaaagatccacccccataattcaattacctcccactggctccttcccacaacatgtgggaattatgggagctataattcaagatgagatttgagtggggacagagacaaaccatgtcagtgtgtattgtgggatgaatggagatggtcattacagtcttctaagtgtatgggtccatctcttacttgctagtgtgttaagaaacctggcctcctttttcacatcttgaggcactgaatggtttacaaatccaactctaattttttattatatttaatacaccaatagtgcaaggcctttattggtagtactctcctattacagatggagagactgaggctcagagaggtgaggtctgaacttggagctctggactccaaaacccagtttcttttcatggtaccaggctgccaggaggagaaaggatggagcttagattcaagtcttgcaacattcttcttagtccagtattggcttattttgttttatatttttttgagacggagtcttgctctgttacccaggctggagtgcagtggcgtgatttctgctcactgcaacctctgcctcctgggttaagcgattgtcctgcctccccctctcgagtagctgggactacaggtgtgtgccaccgtgtccggctaatttttatatttttaatagagacagggttttgccatgttggccaggctggtctcgaactcctggcctcaactgatccacccacctcagcctcccaaagtgctggggttacaggcgtgagccaccatgtgtggccgggcaggtgatttttcttgtctttcgcctctttccacttcagtccccctggccatctttcccttccttgaatgtgcctcctcccacctggtggcctttgtaggtatgaggtccttcagatgatggctgacatgacacttcctcagagaagcgttccagaccccaaacaccaggtctctgtctgtgaaacagggacagtgatacctgcctaatctgcacgcctttcccttctcacgagatattctgggaagggggactcaactctttgctctgtttgagggcagagtgcctttgagctcaggagagagtgggtttgggtggccttagctaccctagatacggaggacttggagttaactggcaccatccacaaagccttgcatgcactggacctgaacaagttgcttagcccttgaggcggcgcctcagctaccacctgtctttgatggagttatgataacagtgcctgccccgtctggatgccttatgggttcagtgagcacataggtgtaaataaagtgctttgagtggcacctcagcatgtagttattctctgattgacctatagcagccatgccagtcttcagggtcccagggcgccaggctttcttctcttgccttggagccttggtttttccctaggactgaagtgttctgaccccttggctgaactcccccttctttaggaagctttccctggtgtgccatctgatgctggtgcttcctggaggggtactatctgatcctagctggtgaggcattcctgccagagctgcggcaggtgctttccccgcctctccaccagcctgtgaggtggatgccatccccacgagggcacgcaggttcacagagactggctcctgtccaaggccgcgtggctggaaagagacagaaccagattcaaacaccagcagtttaaccctagagaccctcatcctacctcctatgtgggtaaccactatacatcctgcctcctctgaaatctcccgtttttttttattttaaaattttatgtgagtatttacttatttatttgctgctgttgttattgttttgagacagagtcttgctctgttttcacccaggctggagtgcagtggtgcgatcttggctcactgcaacctctgcctcctcggctcaagcgattctcgtgcctcagtctcccgagtagctgggactacagacatgcaccaccatgcctggctaatttttgtgtctttagtagagatggggtttcgccatattggccaggctggtcttgaactcctggcttcgagtgaactgcctgccctggcctcccaaagtattgagattataagcataagccactgtgcccggccaaaattttatttatttatttatttttttgagatgtagtcttgctctgtcacccaggctggagtgcagtggcacaatctcggctcactgcaagctctgcctcccaggttgacgccattctcctgcctcagcctcccgagtagctgggactacaggcgcccgccaccacgcccggctaattttttgtatttttagtagagatagggtttcaccttattagccaggatggtctcgatctcccgacctcatgatccgcccgcctcggtctcccaaagtgctgggattacaggcgtgagccaccacgcccagcctaattttatttattaatttatttgagatggagtctcactctgtcacccaggctggagtgcagtggtgcgatcttggctcactgcaacctccacctcccaggttcaagcgattctcctgcctcagcctcctgagtagctgggactataggtgcgtgccaccacgcctggctaatttttgtatttttagtagagatggggtttcaccatcgtgatcagcctgacaggctggtcatgaactcctgaccttaagtgattcacctgcctcagcctcccaaatctgctgggattacaggcatgagccaccgcacccagccatattatttctgtattttcatttggcttacctgtcaacttgacacttttttgtttttttaggctagtcaggtgaagcaatgtgagtaagatcacctgtcttgattataacttgtgtgttcagtgtttgtcattcatccctccctgtctctagccttcagttcagggcatgatttggagcaaatgttcagtatctgtttaacaagaacaatcatgagaaatacttactcactacttgtgtttatgaaacattatgtgccaggcactgggctgagcaatccacacaggtcaactcggttaatcctcatgacaacccctgagataagtacttataccaccctcggtgtacacaggaggaaactgaggctcagggagtttttctttaaaaattttttcttttttttttccttgagacaggtcttactttgtcacccaggctggagtgcagtggtgtgatcttggctcactgcagcctcttgggctccagcgatcctcccacctcagcccctcaagtagttggggagtacaggtgtgcaccaccatgcccagctaattttttgtagggatggggtcttgccatgttatccaggctggtcttgaactcctgggctcaagcgatcctccctccttggcctcccaaagtgctggtattacaagtgtgaaccaccacacctggccttaaattttatttatatatttatttttgtagagacgaggtctcactatgtttcccaggctggcctcgaactcctggactcaagtgatcctcttgcctcagcctccagagtagctagaattacaggcgtctgccactgcacttggctcagggagtttaagtcacataatcaggcagcggtctgctcagttagagtccatgcgcttagccatggtgccttcaagtgactccaccagggtcaccccagtacttcctgggcagaccagaccatccagagcgggcaggttgtgctttcctgcatggtgggagaggacgtggcatgaagctttgtgtaaatctgtgcagcctctgccattgtaaatcactggccaccgggacagactcccccacccccttccaaaaactagaggaacagatgggtggagtcgcatccttcctctgcaggcatttggccacccactcccattatggagcatttcctcaggaccaggcacagcgtggagccctttgcatagctcactgaattggggcagcaaccctggggctggggactaccattatctccaccagcccagcaaagaggggaggagggtacagccgagacccagctgcagtatgtggagcacactggggtgccgtgaagatagctgtccagcctctagaggctgacagtcctgccctgacacagtggtttgttctcagactctggcctcccctcttagtgcccgtctgaagacttcagccttcggtcctcttccatcagcatgccgtctcccctgtgcctcagtctccctctctggagtatctgctggggccacagtttggttttattgttctttgagacagggtatcactttgttgcccaggctggagtgcaatggtgcagtcatggctcactgcagccttgacctcctgggctcaagccatcctctcacctcagcctcccgcaactccagtatctggactacatgtaaatgccaccattcccagctaatttttttttttttttttagatagagtctcactcttgtcacccaggctggagtgcaatggtgccatcttggctcactgcaacatccgcctcccaggttcaagccattctcctgcctcagcctcccaagtagctgggattacaggcacctaccatcatgcacggctgttttttgtatttttagtagagacagggtttcactatgttggccaggctggtcttgaactcctgacctcaggtgatctgcctgcctcggactcccaaagtgctgggattacaggcgtgagccaccacgcccagccttcctggctaatttaaaaatttttcagagacgagggttttgcctaggctggactcactatgttgcctaggctgatctcgaaccactggccttaagtgatcctcccacctcagcctcccaaagtactgggattacaggcatgagccgctgcacatcgccacagtttgattttagtatccactttaaggtgcagttagttcttcccagctcctcttttccctatctcatacagtgtagtcacttccctttctcccacttctcaccttcctagattttgtttttctctctcttaccaagttttgagtatgtaatacgtcccagatcggtgctgaacccctggtgtgagttaacttagcaacttttcacgtggtgttctgcagccttcttacagataaggaaattcagagaggtgaagtgtttttgcagagagccacacaatgagctaagaaattagaacccagggcagttgaactccagagccagggaacttaacagcccattcatgcattcactcaggaattccctcttgagtgcctgctgtgaaggcaacctggacgctgtctctgccttcctgggattgtggtgtgtgtgggagacagacacgaaacaaagcaatcttctaggtcagtgtctggctatgctgggtactcagaagggggaagcactgtgctgcaagaggccggctgtttcctcctcacaaggggaggcctgcagtgacattgccaggcctgaatctgccctgccattgggagtgtaatttcctcacgactacaaatgcaaataaatacacacactgaacatgctaccccgctagaactgtggacagcttgttcactgcagttaaaggaagacggagggacacatttgagcacgcatgtgtgagatccagcttgtggcaaaccctgccattctttaacatctgtgggaagtgaagccaccattactgacctcggaggaatcccgggagtagtgggaagaaaagttgcagatgtttgaaaatcaggctgcaggggcagttggggtgaggagcatggatgtctaggagcctgaatctcagcgttggaagcccagttctgatgtaatttttttttttttttttttttttgagacagggtctcactttgtcccccaggctggagtgcagtggcacagtctcagctcactacagcctcatccttccaggttcaagcagtcctcctgcctcagcctcccaagtagctgggaccacaggcatgtgtcaccatgcctttctaatgtttgtatttttttgtggagacagggtttctcactgttgcccaggctggtctcaaactcctgagctcatgtgatcctcctgccttggccttccaaagtgctaggattacaggcgtaagccactgcccagcatccccacctttttttttttttttttaaatttgtggtttggtgcaggttattttacctccccaggcctcggtttcctcatctactcaagggcaatggcagataatcaacctcacaaattccccgaggagttagtaggcttgtgcctgccaggctcagctggcttacagcaggtgcttcataagggggagctattgcaacgcctcggctggttctaggctgcctagctccagagctaagagtcccagtgggttcatatccctttgagcatttataggcttctcacaggtctcctgggctttctcagccattcctcatctgacctgaggaggtgtgatgtccttgcaggactcctccagcccctctgagcttttttttttgtttgagacagcatgttgctctgttgcccaggctggagtgcagtggtgtgatcatggcttactgcagcctccacctcctggggtcaagcgattctcccacctcagccttccaagtagctgggactataggtgtatgttaccatgcttgagtaatttttaaaattttttgtagagatgtgatctcaggctggtcttgaactcctgggctcacctgggctcaagtaatccttgagcccaaagtgttgggattacagatatgagccaccttgccaggccctgagctccttctgtcttccatgaaggacacactattccttgccttttgtctttttttgtgtgtgtggcagggtctctgttgcccaggctgggatgtgttggtgcaatctgggcttattgcaacctccgcttcccggattcaagtgattctcctgcctcagcctcttgagtagctgggattacaggtgtgcgcaaccacgcccagctaatttttgtatttttggtagacatggggtttcaccatgttggccaggctggtctcagcctcccgaagtgttgggattacaggcataagccactgtgcctggccactttttgtcttttgcatgttctatacaccttgccgagaatgtgctttccctgcctcctggttatccctcaggtttcagctctaacatcacttccccagggaagccttaccctcgctttcttctgctataggataatatgaaccaccatcattgttacttgtttagtgtctgccctccctgctaggcagcaaggacagatatcttgcctgtcttaggtccccagaacccagcacagggcttggaacatgtcaggtgctcaaatatttgttgaatgagtcagtctgggctcgcagagggagctgggaccagagtagagtggacactgaagcgtatgtagcagtttgccaggcgatagggaaagagaccttcttgtaaagcaagcagagatgagagggagaaatgagaattgctaagattgttttgagcatttgttaggtggcttacagatgctttgctgaacattttattcatgtgatcttgtttaagcctctcatttccatgaggggttctccatttttatagacaaggaaggggacacgtggagaggggaagttactttgccatatcaccctctaagggatttttttttttttttttttttttgagatggagtctcactgtcaccaggctagagtgctatggcgcaatctcggctcactgcaacccccacctcccgggttcaagtgattctcttgcctcagcctcctgagtagctgggactacaggcatgtgccaccacatccggctaatttttctatttttagtgggtacagggtttcgccatgttggccacattgatctcgaactcctgacctcaagtgagattcgcctgcctctgcctcctaaaggcagtaagggaattgaacctaggcagtctgactcttaagagctcaaagacttaagctctgtcctgagtagcttcgctggtgtatggtatagggatcagaagagagctggtctgtatgcctagagggcatcctgcagtgggcatgtgtgtctgtggtcacagtgggagagagagaggagggggcatctgtggccagaatggggaggcctcgaatgccaggatgaagagtttgggcctatggtaatgagaatagtaatagctaccagttattgacttgccagccacttgattgagtcatttaacctcacaacagtcctatgggataggtgttaactgttttcatcccagtttttcagatggggaaactgagacacagaagttgtagtcagttatccaaagtgtcgcagtgagaaagtgctggagttggggctcagaccctgtgagtcaggccccagagttcactggggccacatgctcaaccaccatgccgcctgcctgccgccggggctgagccagcggaaacctgggtgctgcttctgatgcaggtggtctcctctgctctcttccccagcacccccccaggcagcagcagcagttttcatctctggatgacaagccccagttcccaggggcctcggcggagtttatagataagttggaattcatccagcccaacgtcatctctggaatccccatctaccgcgtcatggaccggcaaggccagatcatcaaccccagcgaggacccccacgtgagaggcggcctcccccacttcccgtgccccccacgcccaggccccttgcctgtctcctctctggtcccaactgccccacgtctatctgtgcctccacccgcagctgccgaaggagaaggtgctgaagctctacaagagcatgacactgcttaacaccatggaccgcatcctctatgagtctcagcggcaggtgcgtggggacaggactaggggcggggggctggaattacctgaggtcccctacctgtgtttgggccaaaggaatggctcccaaggaggacagattcttttttgggggggttccatagagttctgagggttctcttgggactctggaggagaagtgtgagagcagtcctgccttagggcagaaggatggacctgatcactaaaaaacacctactgtgtgcctggctgggggctcgcctgtgtggggagagggcagggagaaggcctgacagcccttcctcttggaaatgcacagtcctgagaaacagggtgggtccccagtgcttcctggagtgctccaggggaccgccctaggcccatgtgaaatgggctgtgatcccctgataaatcctagtatcagggacaaggatccagtcaagccagtgtcaacaaagagggaagttattgactccaatgaccatacatccagagggtcctgttttggggcacagctagatccagggggtcttccaggcaggaagtagagggaaggcggaaggccagacatggcacatcccagctatcccacacccccacctttatagagctttctgggtagtcccacctagtgacatctgcatacatttcctgggccactcctagctgcaggggagactgagaaatgtattaataatactttagtcccggcagttgctgcctgcgggagattgagacctctgttaacagaggaggggaatagtatactgggaaggcaaccaggagcctctgccagtagccccgagtcctgatcctcagggggctggttgcaggctcttacccacgctaacctggacagtcctgccaggccctcagtactcagcaccgcccactcacttggcactggaatgtgcattaacttttaattggctccccacttagaagaaagcacacattcatcagtttcccccacagcaacgggaaagccaggcctgggaacacatggaggagggcaccgccgagccgcgaggagctctggccccggggtgtccctcagggtgctggccaggctgcctttgttccgctttacacatggccctgtgtgatctcatgtccatccgtatgccagggctgcccagagccccagccagactgcttgtcagagccctgcttggcttctcgccctggatgtcccacagcaaactaatcctgtctgaacttgacctcgacatcttcctcccaggcgtgctcctttgcctcacctagtccgtttctcagtgaagagcaccaccatccacctgcttgcccacaccagaaacctcatctcatccctgtctcctccctcccccttgctatccctttctcccctctcattccctctgtctgtagatatttcttttttttttttttttttacttttgagatggagttttgctcttgttgcccaggctggagtgcaatggcacgatcttggctcaccgcctccctggttcaagcgattctcctgcctcagcctcccgagtagctgggattacaggcatgcgccaccacacctggctaattttgtatttttagtagagatggggtttctccatgttggtcagtctggtctcgaactccctacctcaggtgatctgcctgccttggcctcccaaaatggtaggattataggtgtgagccactgcacccagctgtagctacttcttttcttttatgttatttttatttatttatttagagacggagtccacctctgtcgcccaggctggagtgcagtggcgcaatctcggctcactgcaacctccgcctcccaggttcaagtgattctcctgccttagccccccaagtagctgggattacaggcgcccaccaccacactcggctaatttttgtatttttagtagagatggggtttcaccacattggccaggctagtctggaactcctgacctcaagtgatccgcctgccttggcctcccaaagtaccgggattacaggtgtgagccaccgtgcctagcctgtctgtagatacatctttaggaagtgctcagctgctcagcagcacactctgagacccagccccatcctttctctgcttcactgttgttggtgagttgaccttcgtgctctgcttgtggcctcgtgttcacagcatggctgctgcatgtccaagcttcatggctgtctgcaaggcaggaagaagtagggagtgggtagggctggcaccagcagcagtggtctcttctatccagaaagcaaaagcagacttccaccaaaatatctggctaaaactgtgtcccatggccacctctggctgcaagggaggccagggacctgagtgcgtgtctttttgaggctcaggttaggggatttgggagaagggaactgggcactggtgtggccagctgacagggtctgctgccccctagcacagccgactcagcttcctcagacacatccacctgctcctctcccgcctccctctgctaccaagctgggcctctgccccctctctcctggcttgctgcaatcagccttgatgactccatccatttacctcactgcagcctgagagcaattctaaaacacaggtctgaccacattgctcccttgagaagactgtcggcaggttaccactattctcagagtaaaatcaatgtatcgttccctttgttatctgggtgccatctcctctccctcctcatctttccccacccctaccactgtatgtcccagcccttctggcctcatggtctatcattccctctgcctggaaccctccacccaccccatctttgcgcactggtcctcaccgatgcccttccgtggtggaacaggtgcttcctttgggcttctatcacagcaactcgatccctctggcagttctaagcagtctggcagcgtcttcttaaaggcaggaaccccagcatggcctggcccaggactggccttcaggaggactgtgaattcatggaggtgttggaagctgggcaggatttggatggctctctgtcattgcccagcataaccaattgtgggaccccggtcccctctacacccccagggccggatctccttctacatgaccaactatggtgaggagggcacgcacgtggggagtgccgccgccctggacaacacggacctggtgtttggccagtaccgggaggcaggtacgtctgtccgtggtttggccctgtggtccccattgaagtgtacactttagtttttctgagtgttcttccaggagcagcatagtgccaggaaggtctaaggagctggaagaagagctttccaagcaagaaagagacaagccagggttaggactctggagggggcagtcttcccactctgaaggccagaaagtgtagtggctcagggtctgtgctcttaaccctttgttaccagttgtcaggttttgggcaagtcacttcccttctctgagcctcagttttctaatctccagaagagggattatgacggtacctgcatccaagggtcgctgggaggatgcagtgaagtcaacgttcgctgtgggtgtggcctgtgcaggagaccctgtctgcctggtgcagtgatcccctggcccctcctcaggtgctgtatccttcggggagcaggagcaggtggaagaaccttgacagacctgagtgcggtgcaagattagaggggcccggcaagcccagatgagtgaaaggaaggaagggtcaaagaccaggaatgaagaaaatcattgagcaggaatgagtgcctgggagcgaaggagtgagcccagggagcagtgagtggggtcttccagggagcttgttggtgtggggccctgcatggggactaccctcagagtgtcagcgagcactgatagggccaggaaggcatatcttaaccctttgtcttagatgcttggggcaagttgcttaactgccctgtgcctctgtttcctcattcgtaagggggatggtagcccttcccaagacagctgttgagggcagtcttggggcagttggcaaagtgccctcagcacagagtaagcgctcagggccaggggttggtgtcatgatcggggactcgccctgggacagcccttcagcagggccagaccacgtggctgtccagagcccccatggaccagcatggcttgcagcctgctcctggactgtctactgctcacagctggaccaggcccttggccccacatgctctaggagggcaaacgccctgtggtgtttgtctaaggtctagtgtcatccgtgcggaaaaagatttccagacaccaggcagcaagctgggcccccgccagctgtgctgagcactgcacctgtttttgctgaagggttctcttgtgagggcaccaggcaggaccgagcaagcctcatgggaatcatgggagccgctgagctctccacatgggagagctggccgcctctgcaagaatgactgtccagcactgagggtcagcagaagtgtctgggcagctgcaaatgggactcatgcagaggcagcatggtgcagggtaaggagttgagtcacatccactctagacttcacttggcaggccactcaccttggtgacgctgtctgtcgtctgtgaagtgagaagagtggtgttcatcatgataggtagtgcctccctgggctcttgacaccagagtgctgttctttttttcttctccttttttttttttgagatggaatctcgctctgttgcccaggctggagtgcagtggcgcgatctcggctcactgcaagctccacctcctgggttcacgccattctcctgcttcagcctcccgagtagctgggactacaggcgcccaccaccatgcctggctaattttttgtatttttagtagaggcgggtttcaccatgttagccaggatggtcttgatctcctgaccttgcgatccgccctcctccacctcctaaagtgctgggattacaggcgtgagccaccatgcctggcctttttttttttttttgaggtggagtctcactctgtcgcccaggctggagtacggtggcgcagtcttggctcattgcaacttctgccttccaggttcaggtgattctcctgcctcagactccggagtagctggaattaaaggcatgcaccaccatgcctggctaatttttgtatttttagtagagatggggtttcaccacgttggtcaggctggtttcaaactcctgacctcaagtgattcgtttgccttggcctcccaaagtgctggggattacaggcatgagccaccgcgccgggccagccaaggtgctgttatatgtgctctttagcctcggagactgtcatttcccctcactgcactgcagagcgagggcacaccgggtgaggttagggcaggccccagtggtgttgcctcattgaggcacctcccccatccatgtgaggcaggagaggcaagcattaccatcaactctaaaagccaggtaagaacctgagtcaacaaaggtgaggtcatgggcccaggccacattctcctaaggagtggagccgagtctttttatggcagtctgacccagagacagctctcgctgtttcccacccttggctgtcttcccagggctatatgtggagtatcagtggtggcactggcagggagtggcgcccggtgaaaaggagtgttaagaggaagcacgtgccaggtgtggtggctcacgcctgtaatcccagcacttcgggaggctgaggcgggaggattgcttgagcccaggagtttgataccagcctgggcaacatggcgagacccccatctctaaaaaattaaaaaattagccaggcgtggtggtgcacacctgtagtcccagctactcaggaagctgagtgggaggattgcttgagcccagaggttcaagactgcagtgagctatgattccaccaccgaactccagtttgggtgacagagtaagatcctgtctctgagaccaacaagaaaagaggtagcatgtgtcaagcaagagcagcagttcccactggacctggagtttcctggtgcaaatcagcctgtgagtctgtattttcttttttcttcaagacggggtcttactctgtcacccaggttgaagtgcagtggcatgatctcggctcactgcaacctctgcctcttaggatcaagtgatcctcccacctcagccccctgaatagctgggaccacaggtgcacgccaccacacctggctaattttttttttgatttttggtagagacggggtttcgctgtgttgcccaggctggtctcaaactcctgagctcaagcagtccacctgcctcacccttccaaagtgctgggattacaggcacgagccactgagcctgacaagtttgtacttttagcacgttcccctgcccctgcccagtccttctcacatgggtggacctagtaccacattctgagaaagcctgattccaaggtcctgtatcagtcccttggaccttctttgaccctctacaagacctttctttccctccttaaccagagcaactcctgtttctatctgttacatatgcagcacagccacatcttgtgtggatttgtattatgtccattcaaaagcatgtgtcagaaaataccagtaaacctgtattaaagttggatgttgaagtagtgctaaccaccctcaactctaactaaaatatcaacaagtgggctgggcgtggtggctcacacctgtaattgcagcactttgggaggctgaggtgggtggatcacctgaggtcgggagtttgagaccagcctgaccaacatggagaaaccccgtctctcctgaaaatgcaaaaattagctggatgtggtggcacatgcctgtaatcccagctactcaggaggctgaggcaggagaatcgcttgaacccaggaggcagaggttgcagtgagccaagattgcgccattgcattctgggcaacaagagcaaaactccgtctcaaaaaaaaaaaaagaaagaaaattaggtagatctagtggtgcacacctggaatcccagctatctgggaggctgaggcataagaattgcttgaacctggaaggtggaggttgcagtgagctcagattgcgccactgcactccagcctgggtggccaagccagactctgtctcaaaaaaaaaaaaaaaaaaaaaaaaaggtaactgctgtgtgtaatgtgatctccattaaatttgtatctaaagagcgggttctgcggtaaagaaaggatttggaaagcactgtactagagagctccctctgaataatgttcccggtctgagtgcttgcagcattgatccacagcgctgcccctaaagtgttggtgtgaaggttgtcccactcttcaggcggggcaaagagcttgtctgagggcaatcacaaacccccttctgtcttctaacttcggaggaagggcccccttaacctggagcggttccctttgatggggaggtgggtgttcaccagaggttttgtttgaagaaaaggttttactgccatacatgggttagagtacttctgtagtccagaagttgtaaattagtggtctatgctgttatttggttcataatgatgattttttttttttttcgagacagggtcttgctttgtagcccagattggagtgcagtggcacgatctcagctgcctgcagccttgaacttctgggctgaagcaatcctctgcctcagcctcccaagtagctggaaccacaggcacacatcaccatgcctggctaatgttttgatttttttttttttttgtagaagcgaggcctcaccatgttgctcaggctggtctccaactcctgggctcaagcgatcctccaacgtcagcctctcaaagtgctgggattacaggcatgaaccaccatgcctggccatagtaatgatttatggttagaatatttcttaaaggtaattgaattagttgaaagcacttaaataccagacaatatctcactaagagaaagaaagaaaaaggctagatttctgctttcttttgaaaaatcagattggccttgctgggcagagtcagtcagtctgaacatcagtcttcctcttaaaacaagcctgagctttcctgtctgcctgccagcatgctgcaggtcacccacagggctgaactgtccccctgtactgcccactcggctaaccattgcctcctcccctcctaggtgtgctgatgtatcgggactaccccctggaactattcatggcccagtgctatggcaacatcagtgacttgggcaaggggcgccagatgcctgtccactacggctgcaaggaacgccacttcgtcactatctcctctccactggccacgcagatccctcagggtgaggatgcatgccctgtaccttgcacatgtgcagaccaatgtcacacccctgtccaggcctcagctcttttgcctgccttctgggtggaattctgggttggtgacaccactagagccctggtctgtgctccagacttcttcttcttatttttttcttttttgagacggagtcttgcactgttgcccaggctagagtgcagtggtgctatcgcagctcactgcagcctccttctcccagcttcaagcaattctcctgcctcagcctcccgattagctgagactacaggtgtgcaccaccacgcccagctaatttttgtatttttaatagagacagggtttcaccgtgttggccaggctggtctcaaactcccggcctcaggtgatccacccgcctcagcctctcaaagtgctgggattacaggcgtttaagccattgtgcccagcccactttttttttttttttttttttttttttttttttggtctgagacggggtttcactctcgtcagccaggttggagtgcaatggtgcaatctcggctcactgtaacctccacctcccaggctcaagtgattctcctgccttagcctcctgagtagctgggattatgggcatatgccattgtgcttggctaaatttttgtattttttgtagagataaggtttcaccattttggccaggctggtcttgaacctgagttcaagtgatctgcccaccttggcctctcaaagtgctgggattacagatgtgagccactgcacctggcctgtgttccagactttgaatgcacctcttgtctgggacccttcagaagagggctctgttgctgtccccaccccattcaggggcctgaagcctgtgtgaccacactctggatttcccaaccacatgcctactgcatttgtctgctcacaaacatagccaacgtgtgcaccaggttccactgtgccaatgcttcacgttcatcatctaataaggaccctcattgtggccatggggacagaggttattatttgctcttgttcctgttttcaagagcaggatgcccgtgttttgtgtgtgtgtgagagacagcaagtgaatgggaaaaaaaaaagtgcaggagcctggccaacatggcaaagccctgtccctactaaacatacaaaaattagcttggcatggtggtgcacacctgtaatcctagctactcaggaggctgaagcaggaggattgcttgaacctgggaggcagagtttgcagtgagctgagatcgtgccattgcactctagccaaagtgagatcctgtctcaaaaaaaaaaaaaaggaaattgaagtcaaagagggaagtcactcgctaacggtcatgtggcacagagggagaggagcagggactcaagtcattgactgtgtacctccagagcctgggttcttggccctgacctttgtctgcctcagtcctcagagtcaagtaagcttccccaaagcttaccgtaggtgccctgaagtcccttcccttataagagcttttttgggaagcaaacccactgggtgccaggcctgcaccctcatagtgtggagaacaaggaatcggagccccttcctgtcctccggggcctgtagcctgatctagggttggtctgggccctggcttctttgccctagggcagctgagatgcatgagtttgtgtctctccaggcctcagcactgtgcccagcacagcaggaggctccacaccccttagctcatagtgttcttttgttgaggaacaagaagcagtttgagcctcttaggtgggaggtgggcagggaagctttctcagaggagggggcatttagggggcatttgagctaaaggtaatagggtttccacaaggctggggcgtggccctaaccttccctctgggtccctgctaagtcacttcaaatacacgaagttcctgccatgtgccggtgccactccaagtgcagggaacaaaagcaacgcaaacctcagccctcctggtgctgccattgtggtgggggagacggacagtaacagagatggagagggaactcctggagtatatgagggtgggggtcctgtagggagcagccaagccagccgggtgtggtgcactgtaggggtggctggggtccgtcactggagtgacactgaagtatggaccagaggatgtgaggggggagctgtgtggtgtcttgaggcaggtgtgagcctggcgtgtttgaggagctgggaggagcccagaggggcaggtgtggagtgagcaggtgtggagtgagcgggtgtagggtgagcaggtgtggggtggttggaggtaaagtccaggaggtggtgggtgggggtgcagatggtgcaggttgggtggggcctcaaggcctttgcctgttgcagggatgtcgacttttactcaaagtgggacaggagccgtgggtggggaggagtctgctcttccttggcctggctcacctcttcatggaatccgcgggctgccctgtggataagggattgggcagtgtgtgaagggctagtaaggaggctgctcagtaacttgggcttgaccagggtggtgcagaggaggaggtaagaggggttaggttctgaaggtggagtagatgtggagaatggcgggaagtttggcttggagatgatactggactcttcagcctgagcagttggaagggtggagttgctttcagctgagcaagaggagacctgggtgggcagatgctggggggcatcaggagctgaggtgtttcctttccccttgaagcctggtgactgctggcctgagccacgcttgagccgtgggtcatgtgagtgtgaatgagtgtgagtgcatgtgagtctccgcccctgctcaccaccctctcatcccctgcagcggtgggggcggcgtacgcagccaagcgggccaatgccaacagggtcgtcatctgttacttcggcgagggggcagccagtgagggggacgcccatgccggcttcaacttcgctgccacacttgagtgccccatcatcttcttctgccggaacaatggctacgccatctccacgcccacctctgagcagtatcgcggcgatggcattggtatgggctctgctggctgctccccaccccgctgggatcatctccttccctccccaatcctgccaccttcctgccacccctaccctccttcctggttctcgtcctgtgtcctgtggcgtctggcacttggtcagccacaggagttgaggtcctgagcactcagccttgctctctgtcctctccctgctcgtccccttggcctcgtgcatgttccttatctcagccctggcctgacctgccttctctgtgtccccacagcagcacgaggccccgggtatggcatcatgtcaatccgcgtggatggtaatgatgtgtttgccgtatacaacgccacaaaggaggcccgacggcgggctgtggcagagaaccagcccttcctcatcgaggccatgacctacaggtgcctgccgctccccccgtcagcacccccacagcactgacagccaccgtagcatcttcctcatatcgatcactgtctccaaaacatggccttatcacctgatgttgcatctcccccttgcctttattccgtttccactcctccttccctagttcatcccccatcctccctcctgacccccactccagggagcccacactgacctggggccccttgcccctgtgcaggatcgggcaccacagcaccagtgacgacagttcagcgtaccgctcggtggatgaggtcaattactgggataaacaggaccaccccatctcccggctgcggcactatctgctgagccaaggctggtgggatgaggagcaggagaaggcctggaggaagcagtcccgcaggaaggtgagggtgccccgcccgggagggtgtgctgggggctgctgcggcctgcagagcttgggaaggatttgtggaacaccgaactgggaggctcagggataaccccagtgatgtctcagatgtggcctgtggagccaggctgctggggccatgtgtgtcctggctctgtgtccttggcatgttgccctccacttccttgtctttgaaaggggatgctggtggtgcccatttcagaaactggtttgagactgggcatggtggctcacacctgtaatcccagcactttgggaggccgaggtggcagatcacttgaggtcaggagcttgagaacagcctggccaaacatggtcaagccctgtctctactaaaaatacaaaaattagggctgggcgcagtggctcacgcctgtaatcccagcactttgggaggccaaggcggacagatcacctgaggtcgggagtttgagaccagcctggccaacatggtgaaacctcgtctctaataaaaatacaaaaattagccgggcatggtgccgggtgcctgtaatcccagctacttgggaggccgaggcaggagaattgcttgaacctgggaggtagaggttgcagtgagctgagatcgtaccattgcactccagcctgggcaacgagagcaagactccatctcaaaaaaaaaaattagccaggcgtggtggtgcgtgcctgtagtcccagctactcaggaaggtgaggcagaagaatcgcttgaacccgggaggtggaacttgcagtgattggagatggcgccactgcactccagcctgggcaacagagcaagactatctcttaaaaaaaaaaaaaagctggtttgaggattaggtggcaaaccgtggtggagtgtacatgccctgcccagagtcagtgtgccaccctccctggcccggtcattaggacccagggcccgtgcagcccagtggtgagggcagcacccggcatagggcagcaccgtgtgtcctgtccctgcccttctctgtgcctcagtttcctcattgcttagctgtctacctcttagggctgctgaaagccttaaatgattccacacacttggatagcacctgatccctgctgggatttgagggttttcattacacttctgctaggataatcatttccattgtcgaggtgggaacacaaaggcttggagtggttaattccttgccaaggccccgcaggaggaagcagggtcctgcatgggaggccggctagcctgcccactgccccatgtccccacaggtgatggaggcctttgagcaggccgagcggaagcccaaacccaaccccaacctactcttctcagacgtgtatcaggagatgcccgcccagctccgcaagcagcaggagtctctggcccgccacctgcagacctacggggagcactacccactggatcacttcgataagtgagacctgctcagcccacccccacccatcctcagctaccccgagaggtagccccactctaaggggagcagggggacctgacagcacaccactgtcttccccagtcagctccctctaaaatactcagcggccagggcggctgccactcttcacccctgctcctcccggctgttacattgtcaggggacagcatctgcagcagttgctgaggctccgtcagccccctcttcacctgttgttacagtgccttctcccaggggctgggtgagggcacattcaggactagaagcccctctgggcatggggtggacatggcaggtcagcctgtggaacttgcgcaggtgcgagtggccagcagaggtcacgaataaactgcatctctgcgcctggctctctaccacctctggtctttgtttcctggagtttgggggtgatttgaggccacccccagcttctccaccttagataaataaggtcaaggctcttgagatacctacttcccccggaagcttgcgcaagctggaaggttaacttcagcagacaggatgggggtgggggggtcctccagagatggtctcctgctctctcacagaatgggagaagcctgctgtccagcagagtgatggggagcccagtggagctagccctgcccagcaggggtgcaggggagcgtccaggatgaaggtcagggtgtggccaagccctgctccccaccactccagggccccacagatgcaaaaacaaccccaggcctcagagtggggagtgcatgtttttcaaaaacaaaaagtaggcaaaaacagtccaccaccccatctttcctgcccaggcccctggctgggggaggccaaggagtggcttaagttgtccagcttctgggccctcctccctcccatcaagacctggaaggaggggctgagccaggggccggccccagaggcccaggccaggtcagcacctccgccctccccaatgagagtcagcactggagccttgggtcttgcagttgtttccagagccgaatgctggcctgggggcccaggggccgtaccagcagcaggttgcggaaagcacagtggtccgcagtgcggtctgctggccaggctgtgaggaagcctgggtgggcctggggcaccaggcccagggctcggatgcaaaggccagtgtagacgtcctcaaaggggaagggtgccacacgggctgccgcccgcagcagccagggtgccaggcgcccggcaatgacgtagccacccccgcttgcataggctgggtagccaccttcgaagaaggactcgggcacatagaagggtcctcctggcttccggagaggcatggcctgggtaaagacctcacccaggtagaggcttcgggccgaggcaggtggcagggcccgcaggtgagccagcagggcaggggtgtgtacaaaggcatcgtcctgagctcgcaagacaaaactcacggtggggcagtggcggcccagccaggccagcagcagcaggtctttgagcgtctggttgaatgggacgtcgaggaagtcccagagcagcaggtcactgtagcgacggctctcccaggccactagtgagtctaggtcaggccccgcctcacccaccggagaccctagcaggaagagcagccggatccctggagctggactgccccacgtctctctcacggcctgtcgttctgcaaagcgccctggttctgacttgacggccaacagcaggtaggggacatcagtatctgagcagctggagacttggctgccaccacctccaggcagccactgtgggaagctccggcaggctgctgacagcaagaagcggcggaggtccttggggtaggaggcgaagtcagggatctcggtggcggcggcggccccccaagcctggcagccccccgtttcagtgctgtccccactgggcagggaccccagccgccactgctgctggttccagtaagcaaagggcagcgggatagtctggcccaggcgggtggagaggttggcaggtagggtgggctcagggttggctggcgtggggcttggcggggtgccccgagggctggggtaggccttgctgagccgggactcggatgtccactcgatgtacactttgaggcccaggagtgtgagcagtgctgacaggcagagaaggcacttggggcagcgcatgacccggcccagggaaggggcggccgcgggagctacaagggagccacaggggagccacggaggccattggggtgtggggatgggcctccagagagggcccagccaggccccaggcagacagcttcacaatctcccatagtccccgccaacccccataacagattctctcggtcccagatcctaaacagctcccctgacccagggacctcgttggtccttattcctagacctaggagtcccccattccaatcccgtaccagcaccctgttcttcccactccgtccaaatgcttccaccttcctaaaagcccaagggtctacctcttccctgtctccatccaggacaagggaccttgccgtctatctcctccctctccctccatttattgccctcaccaggaaatcaggagcgggattcctagctccctggggttagaaacccagcctgcctcccgcaacaccccaaccccagggactggggaaccagggatcccatgcttttttacctctgggtctggctcccgccagctccgggtgccggcctcaggtcaggcctccctcagctccctctgatctgcctgccccagcccctgtgttgtcgaccggcggggcccagccctgcccagccagtccagaggggcggggaggggagtggagcgggagcagggagggccccaggggccggggcggggctgaggcaggagagagggagggagggagggagggaggagggcaggaggccgacctgagagatggggctctggcgtgttagggctggtttctggtgagacagctgggaagggtgcagggggcagccacagaaacaagacgggggctttgtgaggcctgggaggggagaaccagggccagggggtgccagggagggtggggctgaaggctgggcctgggctggggagtgttagagtgaccagggcgaggcagggtcccactgaggcagagatggggaggctgagaggctggcgcccggctgcacccatggccaggaggcggcagtgaatgtgctgagtgggaagggatcggcgggcctgccagagggatgtttgttgttgctgcccagtcagggtgaggtggggggaacggggctggtgaggagaaggagagacagagacattgtggagagggaagagacggccagggagcagagagaggagaactggggtgagacaggcgatggagagagctgagggggagagagagagaagacgggcaagtgggaaggtggccaggagggagagggggagggaaatggagatggcgagaaagataaggggttgcggaagccctgtggggtgctcatggggaaagagaggttgagagaggcaggtggagggcagaggggagggactcaggcttccgagccagacccaggcagaggcggagagggagccaaggggaagaacaggagaggaaaagactggagcttcaagggcaatagagggtgacggggtggggcccacggggaaccccgggagctaagctgatcccctgtacctcctccatccctctcggcacccgggctgcctgcccagcagcgtgggaatctgttcctaccttacccccaacctccggcctggagccagcctcaccccgggcccctcccctcccccagcggcactgtgactccaggaacactcacatccagccccttggggcaggagggggtgtctgcctgtgtttgcatccctgccctccaggggcccctgctgttgggactgcatcagctctctgaagacctcccaagacatggggtaagactaaggggctcccactaagcctgggctgaccccttcactccaccctggtttggggcaggcctgtccccatcatggcaggaacacagtctgtcagcagcagcagttgatgatctgtccagccctgatttcctcccccaaagtttgaataatggagcctgtgggaacagctggaggaagagagtggggaggaagtggtgaatattaatggaataatagttggagtgggaaatgacagctaggggctgggggcaggggcccgagcacctcctgagggagtctgcaagcccactccactctggggctgggggagagggactccaggccccctgagctcatctagcttctgggggcagggggtgctgctcctcctggaagcattaggaagcttcacaaggtgcctttctttttgcctttgccatgtgcctcagtccgggtccaatcaggagagagaaaccacacaggaatgggaatagggaaagttcaatatacagaatgattaactctcatgggattggccactaaggggtgccttcttggggaacatggttggagggtggacatgctggtggaacacgatcattccaatccaacacttctgtctccccaagccttgggactcccctcacccatcttatgctagggcagttctggtctctctgcctcattaactttaggccactgttggatccaagttccggttaggcacccaagcaagctattagaactacgtccagctgcacaaggtaacccatgaaatccagaagctctagaaagcgcactcatgccagtaaatttggcctgagctagtgttacatccaccctcattggtgtaacatccttaaaatccccttctgcacacattccccaagtttctgactctgtatatttgcgaagccttgtcattcttatagtgtaaaagctgctcccgcctaggtcctagctggcacctgttcacctggagcaagctgatttcaccctaggtatttatgggtctagaggcagcaaggggcgctgtggtgagtcttaagaagaatggggtgtatctgttatttctgtataagagctggccataagaaaaaaaaaactgtggtgggacagtggctcacccctgtaatcccaatactctgggaggccaagagggaaggatcactttccaggagttcaagaccagcctgggcaacatagtgagatcttaccgctaatcaaaaaaaaaaaaaaaaaaaaaaggacgaccactttcaaggtgtctgcccctggtgaggtcatcacaaggttttttttttgagacggagtctcactctgtcacccaggttggagtgcagtggcatgatctccgctcactgcaagcctcacctcccaggttcacgccattctcctgcctcagcctctcaagtagctgggactacagacgcccgccaccatgcccggctaatgtttttgtatttttagtagagacagggtttcactatttctactaaagtagagtacttaggcaggatggtcttcatctcctgaccttgtgatccacccgcctcggcctcccaaagtgctgggattacaggcatgaggcactgcacccggcctctgtttttttttttgagatggagtcttgcactgtcgccaaggctggtgtgcagtggtgcaatctcggctcactgcaacctctccgcctcctgggttcaagagatcctcctactcgggagggttcagccttccgagtaactaggattacaggtgctcgccaccacgcctggctaattttttgcatttttagtagagatggggttttactatgttggccaggctggttttgaactcctgacctcatgatccgcctgccttggcctcccaaagtgctgggattacaggcgtgagccaccgtgcctggccacatcacaaggtttctaagcacaggaaggctggtaggttcctcagatgctgataagtcactcgcttggagtgacttgggggttcaagatcgcctgtttactctgggtccaattagatgaccccattccaaagaagtaaaaacttttgggccgggcatggtggctcacacctgtaatcccagcactttgggaggctgaggtgggtggatcacctgaggccaggagtttgagaccagcatggccaacatggcaaaaccctgtctctactaaaaacacaaaaattcgcctggcgtggtggtacacgcctgtaatcccagctactcggtaagctaaggcaggaaaatcgcttgaacccgggaggtggaggttgcagtgagccgagagatcacactactgcactccagcctgggtgacatagcaagactgtctcaaaaacaaacaaacaaaaaatctgggggctgtcatgaaagctgtctagttctcagactgtgacttgagctgagttagcggacccaagcttgtcactgtctgtgggcactcaagggcactctggagaatccatccaataccctggtcttcagaattggcacaactagcacagctgttgagcacagcagccacagggggtcccaaggcacgtgcttcagttggtccctcatctccgtcaaccacaggcacttgtgggattatgatgccattgcatgccatgggcctctggcatcctgtttcccatcagcaagagctcagcgcggcgcccaagcccaaaggcacaaccaaaccaatcctggaatcctatcttaagagtcatctcctgggacactccaggtatcaactctatatccatcaggatgcagtcaggagagaaaaaccacagagtaacttgaacagggaaagtttaatatagagaattactggctttaacagtgaactggaataatgagggcttcactggtaaaatgcttctgaattgactggaaatccatttggggtgctggggaacgttattcccagagaggtgcctcagtggaggcgctgtgtctcctacgcaacttctgagggctggagggtgccaagggcagctgctgaccgcctggtgcttcaggagctgggtgctggggaagccacatgcactgcggcgtccagaggcagaagcacaaccaacaagaaccacgaaggaggcgcctttcctcctataatgcctgtttggtgccctctactgacaaagcttatcccctttcaaaaaacagccaactgaaaaagctgaatttggaacataaagtcaataaatccataaccagcaatactatggggcctggggtgcgctggcctttagtgagtggagtggggcgaaggatgctgcatgtcctgcagtgggcacagcggccctgcacgggggagaaccatccctgtaaagtgtcagtagtagcccctgtgtcagtcagggtccctgcaagaaatggcagtgcactcacataaggacagtttgagaagagtctcctgacaaggtgagtgtggctctctgcggctactaacagcctgagcctttacctccccaggcctgaacaggggcatggaaagggctgcctgacagggtgacaggagctgtgacctttagccaagggcagccaggaataaatactgggaactcacgctctctcctgtgattggccagcaccactcccccaccctgacgttgagtgaagacaaatggaagccagaagtgtggtgagctaccagacattccatgcagcccgctgagaagccacgtgagtggggacagggctaaaggctaggcagggacagggctggctgtgtcccgaggctgctcctccggccctgacttcaggccctcagcccagtcgactcccacaacctcgcaattgggcagcatctcctccaccaatatctgagtgaggccagggttggacacggcagggaggtccgagatgtccagcctgcggaggttcctgaaaaggggtgagaaggacaggaagccagtgtaaggacagcatgtgtgtgtgtgtagggaggtacaggacagcgtgtgcgtgtgtgtgtgtgtataggcaggtaagccagtgtaaggacagcgtgtgtgtgtatagggaggtacaggacagtgtgtgcgtgtgtgtgtgtgtgtgtgtatagggaggtaagccagtgtaaggacagcatgtgtgtgtgtgtgtgtagggaggtacaggacagcgtgtgtgtgtgtgtgtgtgtgtgtatagggagataagccagtataaggacagcgtgtgtgtgtgtgtgtgtgtgtgtagggaggtacagacagcgtgtgcgtgtgtgtagggaggtacaggacagcgtgcgtgtgtgtgtgtgtgtgtgtgtgtgtgtgtgtgtagggaggtactggccccaaatttcaaccttacaggacagtgtgtgtgcgtgcgtgtgtgtgtgtgcgtgcgtgcatgcgtgcatgtgtgtgtgtatagggaggtactggccccaaatttcaaccttagcttcctaaaataaaatctttatagctgtccaggcacatgaagcccactgtgttaattgcaaatatgcaactccagctcctgctgttctgcaacagcgtcgatatcacacagttttgactaaaacaaaaaggaagaaaaccaggagtcatttaattcttccagagactcactgtgactgctcatctaccataaatactctaggtttgtgatggatgcagggggatatgagaactgcctaacattgcccctccccacttcctctcctgcatctgggttaggtgggagaggtgcctgggcatgtggcccagcctgagctgaggtctcactggaggtggtggaggcaggcgaggccccgttcggagatgcgggggcaaccggccagcgagagctcctgcaacgagtcggccagtgggtagaggcggctgagacaccagtcgtccacgtggcagcagcgctgcagcgacaaggactggagctccttcaggcggactgcggtggggagagggtgggatggcaccaggagcctttctggagcccatcaccaaagggaaaacatagaggcctgtcccatctccaccccaccgcactcacggaggttatccaggccctcgtagttgatgtcacagtcaccggcatccacagcttcgacaggcacttcacagaaattccagaactcctgagagaaatggccatacttatctggcctgatccactccttgtctcgaaacctggaaacgggaaagggagtgtcagcagggcacctgaacctgccccaggcctccagcctcttcagaaccttccccagccctatataatatgtataggtcacccttgacataactaattccatcttagaaaaagactccatctggctgtgcgcagtggctcacgcctgtaatcccagcactttgggaggctgaggcaggagaatcacttgagttcaggagtttgagaccagcctgggcaacatagtgagacctcgtccctatgaaaaaatacaaaaattggccaggtgcggtggctcacgcctgtaatcccagcactttgggagccgaggtgggcggactacgaggtcaggagatcgaaaccatcctggctaatacacggtgaaaccccatctctactaaaaatacaaaaaaattagctgagcatggtggcaggcgcctgtactcccagcttcttgggaggctgaggcaggagaattgtttgaacctgggaggcggagcttgcagtgagccgagatcgtgccactgcactccagcctgggtgacagagcgagactccatctcaaaaaaaaaacaaaaaaacaaaaattagctgggcttggtggcttgcacctgtggtctcagctacttgggaggctgaggtgggaggatagcttgaacccaggaggtcgaggctgtagtgagttgtgatcatgccactgtgctccagcctgggagaccctatctcaaaaaaaaaaaaaaaaaaaaaggaatgttttgccaattttacatacctagaaactgagggtcagcgagattacagataacataagagcaaagaggtaaaatgcaagaatccttgtagatgggcagaagttaagggacattttcaaacatgtatactgtttctaaggaagttgccagaggaagtgctcaaaccagatggaggggtagatgaagtctatgtgaactgtcttttccaaaaaaagaaaaaaagcaaaggaaagagaaagggaaggagaaaggaggcggggaagaaggaaagaaagaaaaacattattgagcacaggccaggcgccaccagtggctcacgcctgtaatccccagcactttgggaggccgaggtgggtggatcacttgaggtcaggggttggagaccagcctggccaacatggtaaaaccctgtctctaccaaaaataaaaaaaattagccgggcgtggtagtgtgcacctataatcccaggtacttgggaggctgaggcaggagaattgcttgaacccaggagatggaggttgcagtgagccgagattgtgccactgcactctagcctgggcgacaagagcaagactcttgtctcaaaaaaaaaaaaaaattattgagcacatatgcattgctaggcttcttacattgcaaaatcacagttaatctctcactccccctgacagggtcccactgggtagctgggattacaggcatgcaccaccatgcctgggtaattttgtattttggtagagacgaggtttcactatgttgccgaggctggtcttgaactcctgggctcaagtgctgtacctgccttggcctctcaaagtgcaaaggcatgagctaccacgcccagccattattattattattttgagacagagtcttgctctgtcacccaggctggagtgcagtggcgtgatcttggctcattgcaacctctgcatcccggcttctaagggattctcctgcctcagcctcctaagtagctggcattacaggcgtgcgccaccatgccaagctaattttgtatttttagtggagacagggtttcaccacgttggctaggctggtctcgaactcctgacctcagatgatccaccagcctcggcctcccaaagtgctgcgattacaggtgtgagccaccgcgcccggcctattattattttttgtgatgaggtctccctgtgttgcccaggctagagttcagtggtgtgactacagctcactgtagcctcctggactgaagcgattctcccgccttagcctcctgagtggctgggaccacaggcatgtgccaccatacctggctaatttaaaacattttttgtagagacagggtctcacaaagctgctgaggctgttctcaaactcctggcctccagtgaccttcctgtctcggcctcccaaagtgctgggattacagaatgagccagtgtgcccagctccgttcagtctttttttttttttttgacacttttgagatggagtcttgccctgtcccccaggctggagtgcagtggtgcaatctcagctcactgcaacctccacctcccgggttcatgcgattctcctgcctcagcctccccagtagctgggattacaggcgcctgccaccacgcccagctaagttttgtatttttagtagagacagggtttcgccattttggccaagctgctctcgaactcctgacctcaggtgatccgcccgccttggcctcccaaagcattgggattacaggcgtgagccaccgtgcccggcccctgttcactctttatagcaaaccttgtgggttagaaatgaccaccatcccattttacacgtgacaaaactgaagctcaggaacaagtcccaagccacacagccaggaggcggcagagaccaggggactctgaagcctgtgtgactgcagaacctggatgttagagagataccccaccacctgccccagcccgttctaacaccttagcggtcatacttgactgcgcctccctgcttcaggatgaaaaaggcacctgcgccgtatggaccatgttgcttctccagccaggtgtaagatctgcagagaaaatggtagctaagggtgaggcctggggagcaccacagccctcacgatgccccagtgctgttaagaggggcagagtccagagaaccaggcacacagacagattcagtcaggctgaaaatatttattgcccacctcctaagtgctgggcactgggggcaaagtggtgaccaaggcagataacatccctgcccagtctggagattactgcagtaatccaagctattatacagggagaaacagataacaacccaggaaataacagcaaactgcagagaatgtcaattccatgaccaaacaaagcagagaggctgactgtgagggctagggagcagaggagtggggatggtggaggctaactgagtttgggtgttaattggaggaggtgacatttgagcagggatttgagtggtgagaaggaacagagtataaaggctcagagacttgaattaggatggttgaataaataagaaatagggatgtcatgctgaaggggccagtggagtcctgatagggggtctcaaagctcagtaggagctatgttttaggccttggagattggctcttatttgaaggttttgagctggtgatgataagattccttcagctgctttgtagattataaaaaactatgggacaggccaggtgtggtggctcacgcctgtaatcccagcactttggaaggccgaggcaggtggatcatctgaggtcaggatttcgagaccagcctggccaacatggtgaaaccccatctctactaaaaatagaaaaattaggtgtggtggcgcctgcctgtaatctcacctacttgggaggctgaggcgggagaatcgcttgaacccaggaggtggagattgcaatgagccatgatcacaccactgtactccagcatgtgcgacagagtgagactctgtctcaaacaaaacaaaacaaattttggcggggtgtggtggctcatgcctgtaatcccagcactctgggagaccgaggcaggcggatcacctgaggtcaggagttcgagagcagcctcgctaacatggtgaaaacccatctctactaaaaatacaaaaattagctgggcctggtggcgggcgcctgtaatcccagctacttgggaggcggaggcaggagaattgcttgaacctgggaggtggaggttgcagtgagcttagattgcgccactacactccaggctgggagacagagcaagactccatctcagaaaaaaaaaaaaaagagtatgggaacaaaaacccagttagcttattgagtgattcaactataagggatcaggctacgaatggtgaaggcagtgagaactggtcaaatctgagatattctagtattttattgatggtctggatgtggagggcagggaagcaaagagaggaattagggatgactccttagaatttggcctgaacaactgggtgggcagcaccagtgtttactgggatgggaaggcttgggagtgagcagatgtttttaggggagaaatcagggtttggctttagccatgttaggtttgagatgccagttagactctgagtggagctggtgggtggcaaactgcctatgtgagctggagtccttgagaagggtacagcctggagatggagctgcaagagacatcaaggctggcactggaagccacagtgctgcctgggaatggcaaggacaggacctgggctctggtgggccagggtctccacagggtcttgcagaccagggattctcaccgatttttctcatgcaccttgtacatctccctttggagcaagtaatccctcagagcctccacatcgtagaaatagttggtcaggaactggagtattgtccttttcttcttctgattgccctctggggccactgccgcacccaggcgatggatgcccctgatacgcccattccacatgggggcgaccaggcgcagggactggggagggggagaggaaaggagctgagcctggagcctcctgggagacacagagctggatcccccagttcttgctccatgaacctcaatccctctgcttcccaactcaccctaagttcttccttcaaaacttcaaaactgtctttgagattccaaaaatttccccatgttttttccaagttcctcctccccttagtgaaccctaaattttctcgactagccatatattgttgattttcctaaattcttcctctaactttcccccaaacccttatcactcaaaacctgcattatttgacctcttaattttccacagatttgccccttaattacccaattcttctgctggggtcttcccaaatgacttctttctttccccagaatataatcttaaaaacttatctccaaacctcaaggagagggtgctctgagcaatccctaaaaccaaccaagcttgtccaacccgccgcctgcatgcagcccaacacaaacatgcaaactttcttaaaacattaggaggatatttttgtgatttttttttttttttttttggctcatcagttatggttagtgtattttatgtgtggcccaagacaattcttcttcttcgaacagcgtggcccagggaagccaaaagattggacacccctgaaccgagaagggtataaaaagcatgagctttgaagaggagagtaagaaagtcgaggggtgtggccaatgggaagaagcccccaaactcttcaattttgctttcaaggtctcctcttaatctaccccaatttctctttgctttaaccaaattctttttttttttcaaattatctcgataattttacccaaacccttattttcctcaaaagtttaaagctgccaacctctttaattttccctaaattcattccttgattttaaatcctctgaaagaatatctcaaattctcctcttaatttcacccagatcatgcccttagaacctccaaattgacctcttggttcccccacccatcatgcttttgagttttctgtaaaaattcgtcaatctcccactaactttccttacattcatccttcggtcttctaagaccaaatcccacatcctcgaacaatcccttccaagctctcttatcctacaggccccacccttgcctgtccattagctccttgtgtcatccctccctctgattggttagtcgcgtcgctcttcggcagccactccctcatccccattggatactctcagccaagtccctgcctcctctcgctcgctaaagcgtctcctccgcctgcgaccctcacagatccttcctggcccccactagccacaggtttgcactcccagtacggggcttgccaggcttagcctgctgcctcacggctttctgctctcgtggccgccaacagaggccctgaatgcggaggctgtagagcggacttcaaatttggggctctaggaactccggtcacttaccgcccagggagccgccatcttgctaaggtttcgtaaccggaaggggccggtcttatcccacgctcctggttcagcgcgaacttattctcctgtggccacgccccgcgttttctaaccgtcctcttaaaggtgcacgcactttttactcttaaagggtttagggattgctcacagcgccctctccctgagcttcaaaacgagacacaggtcgggctcacgcacctgtgaacccagcactttgtggaggccgaggcgaaagcatcgcttgaagccaggagttcgagaccagcctgggcaacataggggagcctttatctccacaaagaaatagggcaaccttatatccacaaaaaataaaatgttagccgggcgtggtggtgcacgcctgtggtcccagctactcacgaggctgaggcggggggatcacttgagccggggaggtcgaagttgcagtgagctgtgattgcgccactgcactccagcctgggtgacagagcgagacgctgtctcttaaaacaaaaaattgaaaaacaaaacaaaccccaggactccacaatctttccctaggagaagatggggtgttcttcccggcagagtacctttctttcctgactgcaattgcagtctccccaagctttcttattcttccagcttccactcactacctcctaaaaacagggaatgagggggctgaaaagctgaccacgtcatttttaaaaattagggtcaggtaagagagtgggtgaagaggttagatgtcaaggttagagactgaggtgagatctcaagaccagtttggagttgaaagctagatcgcagcatgaagagccattgtgaagtcttgtggatagaattattcattcattagttccaagaatatttactgagcacctaccacgtgatggcaggcactgttctagatgccgaggttaccatggtgagcaggacagacccagtccctctctcaggaagtcaacattctgggctgggagaggatggatgtgggagaggatgaataagaaacaaaggaatcagcaaggcaattttgatgagaagcagataaaaaaaagtgactgggtgtagggccatcagcaaaggcctctctgaagaggtgacattgaagtagaagtgaatgataaggaaagagccattcaaagatctaggggaaaagcgctgcagggagaggtagcctctagagcagagaggccttgaggtgggaaccagcttgcagacagagataggagactgggttgagaggtgggcaggggctgacggtgcaggcctggtagggttttattctattcacagtgggaagaagggagtgtcaaaatcggatttacattttgtaaagattatttctgccaggtggagaatgtaccttagagcagcggtccctaaccgttttgttaccagggactggtttcgtggaggacaatttttccatagactgggggtcgggggtggggtggggatggttttgggatgaaactgttccacctgagatcatcaggcattagattctcataaggagcaggcaacctagatcccccgcacgcacagttcacaatagggtttgcctcctatgagaatctaatgccactgctgatgtgacaggaggcggagctcaggcggtaatgctcacttacccgctgctcatctcttgctgtgcggcccagttcctagcaggcgaggggctggtactggtccttggcccagggactggggacccttgccttagagggcaagggtggatgcaggggaccagtaaaagaggctgctgtagcagtctaggcaagagatgaatggggatggggcagagggaatggtgagaagtgctcaaatcctgggcctgttttgaaggttaagccaacagattgagaaactaaaagcagacgggcgtggctgtgcacgtgaggaaactggaagggcagcaggtttaggaaggtgggtgtggcagctgaataacgaaccctctccccatacctgtgaatccctgggcactgtgactatgttactttctatggtaaaagggacttggggctgggcgcgttggctcacgcctgtaatcccagcactttgggaggccgaggtgggcagatcacctgaggtcaggggtttgagaccagcctggctaacatggtgaaaccccgtctccactaaacatacaaaaattcgccaggtgtggtggcgtgcacctgtaaccccagctgttcaggaggctgaggcaggggaatcgcttgaacccgggaggcggaggttgcagtgagccaagattgcaccactgcagtccagcctggatgacagagcgagactctgtctcaaaaaacaaaatacatatatatatatattgttcatttgtttattttaagatggagtcttgctctgtcgccaggctggaatgcagtggcgtgatcttggcttactgcaacctccacctcctgggttcacaccattctcctgcctcagcctcccgagtagctgggactacaggcacgcggcagcatgcccggctaattttttgtgttttactagagacggggtttcaccatgtggccaggatggtcttgatctcctgacctcgtgatctaccattatatatatgtatatatatgcaccttgggtctgaaggaagggtccaaggccgagagaggcctgcagtgcttcccagacttttccacagcagaagccctcaccctcaacagggataatatacccataggcaagtccagggtcagcagaattggctgcttggccctaggccagcagcctggacacaggcactccagctaagggattgctgtcttggtgcccctgggagccattcctgcccccaaaggcacactggtgggaaagccctaggatgacccgtgccaagaggacaagcaaggaccaagctatgggcaagccagaggtcaaatggaggctgaggagaggctggagaagtggtggtggggggcaggtggaaggacagagggtgccaggcatctacagacactgagcgcccctgaggggtcaggcctgagacaggcagggaagggtggagttagacctctgcaagaggctatgtttgaaccctgtgagcagagttgaggttagacttcagaaggaaaaagaaaagcacaaggccagctgattctctctgaagagtggactttgggatacctttcccaggaacccccatcccactccctctgccctttactctccaccacgcacacagctccccaggggaccaggccaccctggaccttgctacttcctgctccttgcagccatagctcagagacgatggaactgtggaggcagctgaatcaggctggactggtgcctccggggctgggcccacccccccaggccctgagggaggtctccccagtggaaatccctggtcagaccctcaggactgcaggggcagacactggaggtgcctgcgatagtctgctgtggatcagggaggagctggtgagtgaggggtttggaagggaaagagaaagagaggaaatgagaatgaatggaaatgaacaaaaatagagaaggccagagatcgaaaaacagaatctgagagatagaagcagagacatgagaggcatgtacagacaccgagagacagacatagagtgagggacgggaacagaggtggggacagggagatcccaaaagagagggacagaggtgggaagcagagacggagagcaggaacagagatggagagacagactgaatttgagaaagttggggagggcagagagagggcaagcgagagaaagagagccaaaggcaggggcagagaaatggcaacacataaagacagagagacaggggcatggaaagacaaaaaataaatggggacagagacaaagggaaacagggacagatatagataagagagggaggagacagagagagagaagtcagggacaatgaaatggagagacaaagagaagagttagagatcaagagacactctgagaagcaggaaggcagttagggtccatgggcacagtgaggaccctgcccaggcgctgtggccaggacatgagttgggacctgctctcacccaggtcctggagagaccccttgctctctggggtggcatccctgtgacgtccccttcctactggcaggggaacctgcgccgagtggatgtccagctgctgggacagctgtgcagcctggggctggagatgggggcgctgcgggaggaactggtcaccatattggaggaggaggaggagagcagcaaggaagaggaggaggatcaagagccccagaggaagcaggaggaggaacacctggaggcctgcccagccccacatccacctgactttgagatgatgatctgaggctctgccagtggatttagattgacatacaaatgagatgcaaatgtatgtaaaggagaagggagatttgcaggtcaaagcagatgtggaatcaagtatacccctttagtaagtgctttctctgaaggtgcctgcaatgatatttaggcattggcctgtgagctatgggtgtgtttgcagatgacatgaggatgtgtttggaggtgatgtgggaggttgtagagaagttgcaggtgctttcgcagatgagcctcaggtgtgctgctgagatggggatctctgcaaatatgctggtgatgcatacagatgcgatttcagatcaacgctgtccagtatggtagccaccggacacacatggttatttagtgcttgaaacatggggactgcaaattgagatgtgctgtgagtgtaaaatacacaccaaatattaaaggcttagtatgatgaaaagaacataagacatctcaataatttttagattacttattgaaataataatattttgagcatatcagtattagtaaaaatattactaaaattattttcacctgtttctaaattttgtttgtgtgtattgttcccctccctgtgtccatatgttctcattcttttttttttttttttgagacggagtctcactctgttgcccaggctggagtgcagtggcgtgatctcggctcattgcaacctccatctcctgggttcaagccattctcctgcctcagcctcctgagtagctgggattacaggctcacgccaccacacggaactaatttttgtatttttagtagagacggggtttcaccatattggtcaggctggtctcgaacttctgacctcgtgatccactcgcctcagcttcccaaagtgctgggattacaggcatgagccacctcgcccagcctcattgttgtgttacaaagcactttctgttggaagtgagagtcttttcagagaagtgaaatgttgacagaggaggtgctgattcctttccacgggagttttctccttaaaaataagccgcttccactttgggaggccgaggctgggaaatcacttgaggtcaggagtttcagaccagcctggccaacatggtgaaaccctgtctctactaaaaatacaaaaattagctgggtgtggtggcacgcgcctgtaatcccagctactggggaggctgcggcacaagaatcacttgaacccgggaggcggaggctgcagtgagctgagatcacgccactgcactccaacctgggagacagagagatactctatctcaaaaacaataacaacgaaaaaccaagctgcttcgttttgtccagtggagaccccaggattagggtggggtacaggactggggtttaggggttcaggctccatccccagcctggtcctcattagctaacctgagccaggtctgcagctggtgtcagtgctgctgtttgggggttggggagaacgttgaagtcacgcctagcagccagggaagggggaaggacaccccacaaagcatgcaagcggcagggcattctctctctgtcttggcactctagacagaggcccggggagtctgggggtctcttggcagctacatctagacagtaggggtcatggggaatgaggatgttggatgccatggccccagggtctgggtcatgcttcacaagtgccagggtcctctgtctcttggggagaaagagatgaggggggtacaagtgagaggctggtggggcgacttgtaacaggtgctcactattcaagaacagcatgaggccgggcgcgatggctcacgcctgtaatcccagcactttgggaggccgaggcgggcggatcacgaggtcaggagatcgagaccatcctgactaacacggtgaaaccccgtctcaactaaaaatacaaaaaattagccgggtgtggtggcaggctcctgtagtcccagctactcgggaggctgaggcaggagaatggagtgaaccctggaggtggagcttgcagtgagccgagatcgcgccactgcactccagcctgggcaacagagcgagactctgtctcaaaaaaaaaaaaaaaaaaaaaaaaaaggacagcttggaggatggactcgatgtttaaggggagttgccctaatcctatggcctgggccacagaggtgaaatctatggaagagagtgggagtttgggtgaaggggccagcctcacccgtactgtcctcagcaccacactaactgagctccttccagcagtgaccaagtcttttccaggcctgtccttccagatctcccagaccagtgggagaagatacccatccctatccagggacagccaagatggtcagggtggggacagaggaagtataatctgagggatcaaggctgagatgggggaggcacaggaggcggaggggacccagagaaggcaacaggcccaggctgaaatgtcaggaaagtgatcttagaggagaattgaggcaacaaggaaaaatgagccaagtaaagaaagtgaatgaggctgggtgcagtggttcacgcctgtaatcccagcactttgggaggccaaggtgggtggatcacctgaggtcaggagtctgagatcagcctggccaacatggcaaaaccccgtctctactaaaaatacggaaactagccaggcatgggggtgcatctatagtcgcagctactcaggaggctgaggcacaataattgcttgaacccgggaagtggaggttgcagtccgccaagattgcaccactgcactcccacctgggcaacagagtgagactctgtctcaaaaaaaaaaaaaaaaaaagtgaatgaaaaggatataaaagtagaaaaatagcatacacagaagccatggggcttatctagtgatctagccccctgctactcaaagtgcagtcattcatggaatacagcagtaacagcattgttacagctgtctattgctgcataacaaacagcccccagacattgttgtttcaaaacagtgacagcatgcattttgctcacgcatctgcaatctgcagggatccctcatctctgctccacgctgtctgaggcttcagctggaatcattgttggcgcatttgctctcctgtctggcggttgatgctggctgagggctgggggtgcctctgtttctctccctgtcttgtctccacatgggctaagttgggctcccaaggagcttagaggatgggttccaagggcatgtatcctgagagggagccagtcagaagcaacatcgccttgtgtaacccagcctcataagccatgcagggtcactctcaccatgttgatgccatcgtcaagtcctgatcaggttcaaaggaaggggaaatagccgggcgcggtggctcccgcctgtaatcccagcactttgggaggctgaggcgggcggatcacctgaggtcgggagtttgagaccagcctggccgacatggagaaaccccgtctctactaaaaatacaaaattagctgggcgtggtggcacatacctgtaatcccagctactcgggaggctgaggtagaagcattgcttgaacccaggaggcggaggttgcggtgagctgagatcacgccattgcgctccagcctgggcaacaagagtgaaacttcgtctcaaaaaaataaataaaggaaggggaaatggactccaccttttcatgggggagtacaaggttctggaggagcatgtgggaccggaaacattgctgaaatcatcagtggaaaacgcaagttaccccagcagccgcttggtaggtgtgctcactcccagacccatgccagaccaaccaaatcagatgctgtgcatacaagaagagttccacctgctttgtttgcaaattaggtttgagaaatactgttttaaatcacaaatgtgacactgttttgagcaggtggagcagggaaagagtaattacatttagagagctccctctggctgccgcgtggaggttggattagagggctcaagagtggtggtccagtagaaagaaccaaaaaaaaaaaaaaaaaaatggatgaattgaacattatcaaaattccaaacctgtgtacatcaaaaaacactattgaaaatagatggccgggcactgtggctcacacctgtacttccagcacttagggagactgaggctgacagatcgctttgaggcagggagttcaagaccaacctaggcaacatggcgaaacctcggctctactaaaaaatacaaaaattagctgggtgcgatggcaagtgcctataacctcagctactcaggaggctgaagtgggagaattgcttgagcctggcaggtcgagtctgcagtgagccaagatcatgccactgcactccagcctgggtgacagagtgagactgtctcaataaaaaaaaaaagaaaaagaaaataaaaacacaacctatatattaggagaaaatagttgcagaaatatatctgataaggctctagtatctagaatatataaggaacttttacaactcaacaatgtaaagacaaatattaatagttcagttacaaaatgggcaaagaacttgaatagacatttccccaaagaagatgtacaagttattaagccaataagcacatgaaaagatgctcaacatttgtgtcagtagggttcttcagaaaaacagaataaattatatatatagctaagttatacgtataatttaattaagttatgcgtataattatatatataatttattctgtttttctggaggacccaatttatatatataaattggctcatgtaattatggaagctgagaagtctcacgatctgccatttgcacgctggaaatcgggaaagctggtggtgtattcagtccaagtgtgaaggcttcataaccaggagtgcaaatatctgaggtcaggagaagatggatgtctcagctccaaacaaattcccccttttcccctcccctcccctcgcctcccctcttctttttttttttttgagacagagtctcgctctatcgcccagcctggagtgcagtggcgcgatctcggcaacccctccggggttgaagcgattctcgtgtctcagcctctcgagtagctgggattacaggagcgcgccacatgtccagctaatttttctgtattttttagtagaggggatgtttcaccatgttggccaggctggtctcaaactcccgtcctcatgtgatccacccacctcggcctcccaaagtgctggaattacaggcgtgagccacagcgcttagccagaaaattttaaacattacccatgttttggttgtgcttctactgggctcccacctgctgtgatgccctgtctccaccaggtggcgccaacacacccctgcagcccctccagccaaggcagactggacactgaggggcaggacccgactatgaggtcctttgaggaagcaggtccttatagagggcgtcgttgagacaggctattcccacacagggggctcctgttgagagagaaagtccaagttctggtgagcgggagacaggcaggaataatcactcctaaagctacccatgtcacaatccctggaacccgtgaatggtaacttttatggcaaaagggctctgcagttgttaaggatattgaggtggagaaattctcctgggttatgtgggtggccctcaatggaatcccaagtgtgcttgcaagagagagacagagggagccctgaacacagagaaggtgaggatgtgataacagaagtaggagggtgagtggtgtcaggaaggggctggagcgagggatgcagcagcctctagaaggtggagaagcagcacagatgctccctgaggccaccaggtcagtacagccctgctagtaccttcagttgacacttctgactccaaagccataaggacatcaatttgtgtgggtttaagtgacagatttgtggccacctgtagcaacagctacgagaaactcctacaggcaggaacggggggcagaggcaacggtaattttcctattaaatataacttaagctaaaatgaaaatatcagcaatagaactgatgagactgtgggacagctggagcagtcacacaggtgctgggagtgcgtgctggtacaagggctttggaaaaccctgtggaagtgtgtgtgaccctgaacatacggtatctgggagccagcagttcccctcctgggcatatactaaagagaaaaagagaaacacgtgtaggcgctcaccaaagacacctactagaatagtcacagcagcccaatctttttttttttttttggagacggagtcttgctctgtcgcctaggctggagtgcagtggcacaatctcggctcactgcaagctccgcctcccgggttcacgccgttctcctgcctcagcctcccgagtagctgggactacaggcgcccgctaccatgcccagctaattttttttttttttggtatttttagtaaagacggggtttcaccgtgttagccaggatggtctcgatctcctgacttcgtgatccgcccgcctcggcctcccaaagtgctgggattagaggcgtgagccactgcgcccggccacagcagcccaatcttaatagcttcaaacaggaagttacccaaatgcccatcagcaggaatggtggtgtcccaccccttccattgagagtggggtctgtgtgccagtcccctgagtatgggtgggcttgtgacttctaacactaataagtgtggggaaaatgaactgatgtgacatctaaggctgaatcataagaagtgtgagctttggccgggcgcggtggctcatgcctgtaatcccagcactttgggaggccgaggcaggcggatcgcctgaggtcaagaggtcaagactagcctggccaacaaggtgaaaccccgtctctactaaaaatacaaaaattagctgggcttggtggcaggcgcctgcaatcccagcaacttgggaggctggagcaggagaatcgcttgaacctggtaggcggaggctgcagtgagctgagatcgtgccactgcactccagcctgggtgatagagcaatatttcatctcaaaaaaaaaaaaaaaaaagaaaagtgtgatgctgtgtaagaaacccaactgcttcaggatcaccatgttggagaggtcatgtgtagggctcaggtgactgtcccagctgagccgagccttctggctgtccccaccatagtttcagacctgtgagtgaagaatcatcttatacatagaggcctcatccccagctgttccaaccctgagcttttcagtcaccctgagccattcgcctcacccctgcggaggctttagcatcatggagcagagacaaaactccttgggtttgacttttcagaatttttgatccacagaatcatggaattgtcacaccatttagttgggagtggggttgttacatagcagcaaataaccaaacacaaataataaataagttatgggatagtcatgcaatggaatgtttacacagtatctacttgtagatgatatgtcttctccctcaaacagaaagtaagggttcaagagctaagctatgaagatgcaaaggcataagaatgatacaatggacttcagggactccgggggaaagggtgggaagggggtgagggataaaagaccacaaattgggttcagtgtatacttctcagttgatgggtgaaccaaaatctcacaaatcacaactaaagaaattactcatgtaacaaaataccacctgttccccaaaaacttatgaaaataaaattaaaaaaaaaatcatacataggcggggcgcagtggctcaacgcctataatcccagaatcttgggaggccgaggcgggcagattatttgagatcaggagtttgagaccagcctggccaatatggtgaaaccccgtctctattaaaaatacaaaaattagctgggtgtggtggctcactcctgtggtcccagctacttgggaggctgaggcaggagaattgcttgaacccaggaggcagactttgcagtgagtcgagatcacgccattgcactccagccagggcgaagaagtgagactccatctcaaaaaaaaaaaaaaaaaaaaaaattgtgtgtcattggcattaactttttttagtaaagaaaaaaatggaaaaacaaaaaaaaatggagatatgagaggataatcaccctcatatatttaaatctgttatatatatgaaatttgtgcccgggcatgatattggttttgattatttttatttgcttgagaagtatacctaggtttttctttttttctttttcctttttctttttttgttttgagatggagtcccgctcccatcacacaggctggagtgcagtggcgaaatctcggctcattgcaattttcacctcccgggttcaagcgattctccttcctcagtctcccaagtagctgggattacaggcatgagccaccatgccctgcccttcctgctcctcttgagtatgtctagtaattgacacacttggctgtccacacttcttggccttacagacactgtgctctataacatgactcttaggtctctgcagggcagcccccacttgttgcaggctgacgctgctgcctcctcctcaggcccaccttgcttcccatggcatagtgctggccttagccactcccagatactttcatcacactggtgctatgaagccctgccctgtaactgtcccctgctttgagctttgacctatgaaaaatgaccatcacttgcatctcagtgatgctagtgtccctctcactaccgcagtgctcaccagccctcctcaccatcctagtcagctactgggttattttcttctgtaaaaggcacgttctggcctggcgcggtgctgcagaccatcagcacctctgtgatgaggtgctcactgccatcttgtggtgggggggggtcatctaaacccagaagtgattgtcacggttggctttctagaatctttgctggaatcacatgttggggatcatgttctctaaaagcaaagcatgaggaggtgattcaagaggtgcattgggccaggcacagtggctcacacctgtaatcccagcactttggaaggctgaggcaggaggatcaactgaggtcaggagttcgaaaccagcctgaccaacatggagaaacccgtttctactaaaaatacaaaattagctgggcgtggtggtgcatgcctgtaatcccaggtacttgggaggctgaggaaggagaatcacttgaacccgcgaggcagaggttgtggtgagctgagattgcgccattgcattccagcctgggcaacaagagtgaaactccgtctcaaaaaaaaaaaaaaaaaaaaaaaagatgcattgcaggagtgcgctggggagctcgaggaaagcagcgaagaccagatctggctggagaccctcttaagtctgatcccagggaggctctggagcatgcaccgcagcacagaaggggcctcaccttggtcgctcttatatctctgtgctagcgtgtccctggctgttggctgttctcaggaaggaggtgaatagcaaccacctggaccaggtgactgcccttcagctgaggtcaaatctctgcaggaaaatcatctatgaggtaggaatgagcatcctggagaaggggacctgagcagtgcacccacagtaattcctacactgtgtaaatgtctttaaagaaaagtccagggctgggcatggtggcttatgcttgtaatcccagaactttgggaggccaaggtggggggattgcttgagcctaggagtttgaggctgcagtgtgccatgattgcaccactgcactccaacctgggtgacagagtgagaccctgtctctaaacaaaacaaaaaacaaaacaaaacaacacccccaaacccccagaacatcctgttttgagcaggcctatgcaaatttactcccaaaggccaaagaagctgagagtctgaagaagaggctgacaaatcaaatttctgaagtacaaacatttaatattgcttaaagaagagcaggcatgtttgggtggcagggagatgagatggtggaatcccacactgttacctcccagacccaaggcttacatgcaataggatagaatggtataaaagcccttttatactgtgggttatacaaggaattgaagttgattgcttagaagaagagaaggatttgactaagggcagggtttaggtgaaagtagtaactgtaggcacatttctggagctggctttcatcagaagtcaatttggcaggtgagcatccaagatgaagtgtccttattctccacactccatccccctaattcggctcttacaatctcacgcgccttcctcttccaagatggtccctgagcctttaggcagggaggttggggtgaacatgctgcatcaatgtgttttctacttttttaagcagaggccacagcaacactacagcaggctttgtagaaatcatcagcagcctttgtagaaacagcaggctttgtagaatcatcttcagaatactgtgattttggttaattcagaagtactacaatgaaagatctataacattaataatttgaatagtaggaatagaatgcacacaggattacaataaaaattgttgttgcattagaagccaactaaaactatcataaagaaaaagaaaacccatttattccttggatacttgtagtcaggaaataattcagaatttagaccaaattgcaggtaaataataaaaacctcaaaaacaatgtttagggctagaatctaataacaggtgtagtatagttttcttctgaaacctaattttttttatcttcagtttccacatttctatgaaggataaattgtagtaggaccaatttatttgcaaaataaattttaatttcattatacttggtctgattattattattattatttgagacaaagtctcactctattgcccaggctggagtgcagtggtgtgatctcagctcactgcaatctctgcctcccaggttcaagtgattctcctccctcagtctcccaagtagctgggattacaggtgcatgccaccatgcctggctaattttgtatttttagtagagacagggttttatcatgttgcctaggctggtcttgaactcctgatttcaggtgatcctgcctcagcctcccaaagtgctgggattgcaggcatgagccaccgtgcccagccgtggcctgattatttgcaataatgtgtagaaagaatagtgattggccatatagcctcttttaaaattggctttgctggacctttcacaagtaattttggactagatgtttagaaacatcaagggcaggaagcaaaaccaataatttgccatcagactgtgcttgtagtacctgtataaccatgcaacatgttcttcttgcccattgcacagacaaaaccaatttactgagtccgtggtattgcagtagagaaggtttaattaaatcagagcaacccaaggggtaggactgggattattaatcaatctccctaataactcagaggctaggatttttatggataatttggaaggcagggggctagggaatggttgctgctgattgtttgaggatgaaatcataggggtgtggaaaatggtcctcatgcactaagtccatctctgggtgggggtcacaggactggaaatctcaggacctctggccatgtgactcctgagaagcaagagattatagaaaggcaagctgtgggacaatgacttgttatcagtcagctacacctgcattttagcagaattcaggcccctctcataatcttaatcttgtgggctttcatttgtcatacaaaggtagtttcagtccctgagcaaggaaggggttcattttagggagagactattatcatccgtgcttcaaagttaaactataaactaaattcctcccatggctagcttggcctatgcccaagagtgagcaagggcagccagcctgaggccagacacgagatgaagtcagccatgctggacttctctcatattcataatctttgcaacagcaatttcacctgtatgaactgggtgaattcccccatcttcttgagatccctacataacttgaggttcctgagcctgtcagaaagtgacattctttactttccacaggtgagggaccttaaaaggaaagcatattgaaaatatacccagtctttttttctccaagaagattcttatcagctccataaagtcaacttcaattcctcaaataagtcgtatttgaattcattccactgtaagccttcaaagagtaatgagtatctccaatggttcctgttacgaaagaaaaccgaatctgattgagcttgtgccaataattatattgccataagtaaaaatactcacaaatagtttccaaattttggagaattcttacagggagaaaggtcagtttcactcacaaaagtatacttggtcaattgctgttagttataaatagctcaaaagaaaggttttcctgatgcttcttctaacagagtggcagtcttccaaacaggatgttgtctgttcactttggaattgctatccagagagcaagcagctctttgtcggccaggcgagagctgtttattaggcactgtagaatctagcagcatctcgagatggagcagggacccctcttaggggcttactcgatcaccatcagccagtatggagataaaggaaaatcttgacttccttcaagggaaattccaggcatctagctaggcttgagaagtaaatgagcaacttgatcaacgagaaggtaatggtaacttaaaacaatagccaaggaaattggagtcgtaacatatttggttccctgtgaaaactaaagataacatcttaacatatgtctctgagttgtttccggaaacctggaccctcaccagaaaatactaaaaatacaaaaattagccaggtgtggtgatgagtgcctgtagtcccagctactcgggaggctgagacaggagaattgcttgaacccaggaggtggaggttgcagtgaggcgagatcatgccattacactccagcctgggcgacaagagtgagacgtctgctaaaaaaaaaaaaaaaaaaaaagaaaaccaaagacattgcttactctcatcatccattagttactctcatcatccagttactctcatcattcattttagtaaaggctcctccagaagctgatagcagtctcactcagattgtaccctctggtttctgtactttgttttgctcctccccaacagttactaggttcttggtaaccacaattctcagaagtactttctattgtccctacatgatttggtctttgggaggtggctctgagctagtggctgagactcacattcactgaaatctaagcttagtgtagcatcaagattgaagccagcactctgttttaattttactttagctatgacaggtaacaataactatgggattgaatattacccttttttcttattttgtttgcattttcttaggcatccagtaaactgactcctccaagagttggattcatttctaaattccccagcaaactttaccttcagtaactgtggctctgtgccatgggtaactacatggccactcaggaatcagaggttcctcattactcacctttttatttttttgctttctatacattcaattgtatctatatcattgtgaaagaaaacagaatctccaggcccccaactcactatggctaagggcaagtgaagtttggaaacgtagtcacacaatcctgctttcttttttccccaaacacatagctgtaatttcacaaccctgcgtcattgccgtatcattggggtaaacgagaatatcccagtgacacaaggacacatatcttcccagatggctttcctcataagttgctcacgcggaaattccttgtgagcccctaactctttcaggagaaatattgtaaacaaaaagtaaaattctaatccccccaaccaaccgaatagagccccttcttgtccaagggtatcccctgcaaacctgaaaaactaattcaggtcacgatgagaaggcagggggtcagacacacctcattatatttcttccctttggagttcatgcaaagtgaccagcactaacattaaaacagagatcctggctgggcacaatagctcacatttgcagtcccagcactttgggaggtcgaggtgggcagatgacacgaggccaggagttcaagaccagcctggccaacagggcaaaataccatctctactgaaaatacaaaaattagctgggtgtggtggcgcacacctgtaatcctagttacttaaggggctgaggcacgagaatcacctgaacacaggaggcagaggtttcagtgaatgaagatcgcaccactgcactccagactgggtgacagagtgagaccctgtctcaagaaataagaggaaaaaatagagatcccaacagtgacggaacagactctttgttgcaataagataaccgactccaacctgactctggtatagcatcacataatagataacattccctaaaggaaatcaaagtattttatccccaaatgtatttctttgacatattttggaatggccctgcaaagccatctcttattggagaaatctatagagcatcctcttcctggcttggcacggtgggtcacgcctataatcccagcactttgggaggctgaggtgggcagatcacaaggtcaggagtttgagaccagcctggccaatatggcaaaaccccatctctactaaaaatacaagaaaaaaaaattagctgggtgtggtggtgtgcacctgtagtcccagctactcgggaggctgaggcagaagaattgcttgaacctgggaggtggaggttcaagcaattgtatatttaggatattacaagtatcctggattaagtaatatcctggatattaggaaccatattataaggagggtggacacctttttcgatatggggagtaatattatgctctccccccagaatattatgaacaatttcacaaggggggtgtacacatcctgtgacaatgggagtaatatcatcctctttaaaaaaatattagtatcgatatcatggaggggtgtacacgctctgcaatattgggagtaatattattctctttttccccggatattcacaagaatgtcacagaggtggtgtacaattcctgtgatattgggagtaatatattctctccccctagatattagaaacaatatcaaatggtgagtgtacacactctgtgaaattgggagtaatgtcatcctcttccccctggatagtaaaaacaatattactgggggttgtgtagactttctgcgatattgggagtaatatcatcctatcccgccctggatattaggatcaatattacagagggtgtacaccctctgcgatatagggagtaatatcatcctttccccccgaatattaaaatcaatatcacagaggagtatacacctcctgtgatattgggaataatatcatcctctcccttccctgtacgttagaaacaatatcacaaggggtgtgaacacctcctgtgatattgggagtaacatcaccctattatctttggatattaggagcaatatcaccttgggggtgggcaccttctgtgatattggtagtaatattattctctccctccctggatattaggaccaatatcacagaaggggtttacaccttttctgatattgggagcaatattatcctcttctcttctggatattaaaaacaatatcaaaaggtcggtgtacagcccctgtgatattgggagtaatatcatcctttttccccataaatattaaaattaatataattttcttccccctggctattaggcacaatatcacaagggtgtgtacacccccttcggtattaagcgtaatatcatcctctcaccccctggttattagaaacaatgtcacgggggagtgtacatcccctgcgatattgggagtaatatcatccctacctccctggatattagaaacaatatcacaggggagttgtaagcttcctgcgatattgggagtaatattatcctctccccttctggatattaggaacaatatcacagggaaagtgtacaccttctgtgatatagggagtaatatcattttctcccccactggatgttagaaacaatatcacagggaaggtgtacagcccctgccatattaggaataatatcatcctctcccctcatggatattaggagcaatatcacaggggaatgtacaccccttgcgatattgaaagtaatgtcatcctcccctactctggatattaggaacaatatcacaggggttgtgtacacgccctgcaatattgggagtaatattctctcccccactggatattaaaaacaatatcacagggggttgtacaccccctgcaattttggaagaaatattatcttttctccccgtgtatatcagaaacaatatcacaagggggtgtacacactctgcgatatcgggagttacactgtcctctttccccatacatattagggacaatatcaatacgtgggtgtacatcccctgtggtattgttcttaatatcatcctctgcccccctatataataaaaacaatatcacaggaaaggtgtacatttcctttgatattgagagtgatatcatcctctttccccttagatattataaacaatatcacaggaggggtgaacaccccctgtgatatagggagtaatatcatcctctaccgccctgaatataaagagtaatataacagagggggtgtacacactctgtgatattgacagtaatataattctctgccccccagatattaggaacaatatcaaaaaaggggtgtacaacccctgtgatattgggagtaacatcctctccttccctggatattacaaacaatatcacaggggaatgtacaccctcccctgtgtatggggtagtaatataattatctcccccactagatattagaaacaatatcacagggaaacaatatcactgcgatattgggagtaatactatttctcccagcccgagtattagaaacagtatcacagggggagtgtacactccctgcaatattgagagtaaaaccatcctctccccacttggatattagaaacaatatcacagggaaggtatacgtccccttagatattgggggtaatagcattctcttttttcctgggtattaggagcaatatcacaggggtggtgtacaccctgcaatactgggggtaatatcattctcttcccttttggatattaggaacaatatcacagggaaagtgtgcaccttcggcgacattaggagtaatatcatactcttccctccttgatattagcaacaacgccacaggtttacatcccctgtgatattgggagtcatatcatcctcttttccccttgatattagaagcaatatcacaaagggtgtattcattccctgctatactgggaagaatatcaacctctttttttcccctggatattaggaataatatcccagggggagtgtacccattctgctatattgagagaaatatcaccctcatttcccctggatattagaaacaatataaaaggggggggtgtacacttcctgtgatattgggattgatatcatcctcttcctttttggatattaggaacaatatcacaggggggtgaacactctttgtgatatggaaagtaatattatcctctccccccctggatattaggaacaatatcaaagagggcatatacatcccctgcgatattgggagtaatattatcctctccccccctaaatcctaaatattaggagcaatattacagggtggagtttacaacccttgcaatattgggagtaatatcaccctctcctcccctggatattaggaacaatatcacagggatgtgcacaccccctgcaatatggagagtaatatcattctctcccttcctggatattaggaaccatatcacaggtggggttcacaacccctgtgatattgggagtaatatcatcttctttttttctggatattaggaacaatgtctattgggggaactagcccccaatatttcaaagtaggttcttttctattttccttaagtgtcacctggtctgagaaataaagtgaaagagtacgaaagagaaattttacagctgagcctccggggtgacatcacatatcggcaggttctgtgatgaccacctgatctgcaaaaccagcaagtttttattagggacttcaaaaggggagggggatacgaatagggagtgggtcacagagatcacatgcttcaaatggcaataaaagatcacaagggcagaagggcctagcaaggtcacaaggccagggagaaaatggaattactattgaggttccatgtcctgctgtgcacgcattgtcattgataaacatcttaacaggaaacggggttcaagagcagagaactggtctgactagaattcgccaggctggaatttctaatcctagcaagcctgagggcactgcaggggaccagggtgtatttcatcccttatcttcaaccacataagggatacacccccagagcggccgtccataggcctcccctaggaatgcgttcccttcccagtgatatttctcctactcattttctgcaataagaaaaatgtgactctgttctgcccagccccacaggcagtcagaccttatgcttatctcccttgttcgctgaacatcgctcttatcctgttctttttcagggtgcccagatttcatattgttcaaatacacatgttttataaacaatttgtggagttaatgcaatcatcacagggtcctgaggcgacatacatcctcagctcacaaagatgatgagattaagagattaaagtaaagacaggcataggaaattataaaagtattgattggggaagtgataaatgtccatgaaatcttcacaatttatgttcagagattgcagtaaaggcaggcataagaaattataaaagtattaatttggggataatatccctgtaatatccctggatattacaaactttaccacaaaggggtgtacaccccctgagatatggggataattacaccttccctccccccttgattttacgatccatactacaagggggtgtacactccctgcaatatggggagtaatagcaccttttcccctgctggatattacgaaccacaggggggtgtacaccccccttgatatggggagtcatagtgtagcaggaggagtcgcggacaaaaccccacagacaccgaggtagtgaaggaagtggcttttaatcagctggaagcatcgaaagactagcgtctcaaaatccgagcttgttgagtgcacaatttctgtcctttttaagggctcacaacactaaagatcttacatgaaagggccatgattgattgagcaatctagtgggtatgtgacaggggctgcaggcaccggtaatcagagtgaaacagcacagaacaagaaatttcacaatgtccttccatacaatgtctggaatctatggataacattggttgctaggtcatgggttgaattttaactatcaggctaaggtcaggcaggcccaggcctggtttcgggtctggttttgggtctggtgcctggcgccgggctgcctgcttttggtttcacttccttgtttcttcttaaaacaggtactgagtataaaataatatagaacaatatggggggtctctttctctcttcttttgatagcatcccctcaccccggatattacgaaccataccataggggggtgtacgcctcctgcaaaatggggaataatagcaccctctcttaccctggatatttcgaaccataccacagggaggtgcactccccccacgatatggggagtatgggggtaacagtaccctcaatcccctggatattacgaaccataccacaggggagtgtacatttccagcgatatgaggggtaacaacaccctctccgttcctggagaatacaaaacataccacacaggggtgtacacaccccgcgatatagggagtcatagcatcctctctccccctggatattaggaaccgtaccgcagcagggtgtacatgccccgcactgtggggagtaatagcaccctctccctgcctggatattatgaaccataccacagtggggtgtacaccccttgcaatatggaaagtaatagcaccctctttccttctggatattaagaaccataccaaaggggggtgtgcactccctgcgatattgaaagtaatattatcctgttcccttctgggtattaggaacaatatcacaagggaatgcacatgccctgcggtattttgagtaatatcatcctctccccttctgaatgtcaggatcaatatcacagggaggtgtacaccttctgcgatattggaagtaatatcatcctctccttttctggatattaggaacaatatcacagaaggtatgaacacccctgctatatatccagtaatatcagcctctcccctcctggatattaaggagaatatcacgggggggggggtgtaatatcatcctcttccctgctggatattaggaacaacatgacagggtgggtgtacacttcctggataatgggattaatatcatcctctttcttcctggatattaggaacactaccataggggaagtgtaacccccctgcaatattggtagtaatatcatcctctttttccctgattattatgaagaatatcacagcggggatgtacaatttctgctatattgagagtaatatcatcttctccccgcctgaatattagaaacaatatcacaggaaaaatacacaccctctgcgacattgggtgtaatatcatactcttttcccatggatattagaaataatatcataggtggggtgtataccccctgcgatattgggagtaatatcatcctcaccacttctggatattaggaacaatatcacaggaggtgtgtacaccccttgctacaatgggagtaatatcatgctctttccccctggatactaaaaactatatcacaagaaaggagtacaaaccctgtgatattgaaagtaatattatcttctttcccccttaatattaggaacaatatcacatggggtgtgtacacctcctgcgatattgagagtaatattattttcccctcgcctggatataaggaacaatatcacaggaggggtgtacaccccctgtgataatgaaagtaatataatctcctccccctcttgatattaaaaacaatatcacctgaggagcacacaccccctgtgatatggagactaatatcattttctccccaccgaaatatttagaacaatatcacggggggtgtacaccttatgtgatattgggagtaatatcatcctctcccaccctgtatatcaaaaacaatatcacagggagtgtgtacactccctgtaatattcacaataatatcatcgttttcttccctggatattaggaacaatatcacaagggtggtgtacatcccctgtgatattgggagtaatatcatcatctcctcccatggatattaggaaccatatcacaggaggggtgtacaccttgtgcgatattgggagtaatattatgttctctccacctggatattaggaacaatatcacatgagcggtgtacaccccctgcgatattgggagtaatgccattttctcccccttgatattaaaagcaatatcaccaggcggagtgcacaccccctgcgatatcgagactaatatcattttctgccaacctaactattaagtacaatatcacagggggtgttcaccccttgccatattgataataatctcccctcctggatatgaaaaacaatatcacaggggcgtcgtgcaccccctgcgatactgggagtaatataatcctctccacaccctggatatgaggaacaatattacaaagcgggtgtacaccccctggaatattcacagtaatatcatcgtttcctttcctggatattaggaacaatatcacaaggggggtgtagacctccagcgattttgggagtaatattttcctctccccctctgtatattagaaaccatcatgggggggtgtacaccacctgcgatattgggagtaatatcatcctcttcacccctggttattaggaacagtatcacttgaggggtgtacctctactgcgatatcaggcataataacatcctctccccccgaatattaagaacaatatcacaggtggactgcacaccctctgtgatattgaaaataatatcatcctctgcttccctgaatattaggaataatatcacaaggggggtggacaaccccttctatatgaggagtaatatcctcttccttcctttatattaggatcaatatcacaaggggggtgtacaccccctgcaatattgggagtaatattaccctctctttttctggatatcagaacaatatcacaggggaagtatacattccctgtgatattgcgagtaatattctttccctctactaaatatttgcaacaatatcacagaaaaggtgtacaacccctacgatattggcagtaatactattctcttccccctggatattaggaacaatattacaggttaaatgtacactcctaagatattgggagtaatatcattctcttttgctctggatattaggaacaatatcgcaagggcgatgtacactctctgagatattgaaagtaatttaattatctccctcccggctattaggaacaatatcaccggggagtgtacaccctctgcaatatttagagaaataagatccccttttcccctagattttaagaactatattacaggggatgtgtgtacaccccctgcgatgttgggagtaatatcatcctctctccccctaaatatttggaacaatattacaggggtggtgtacacaccctgcgatactggcaataatgtcatcctctccttttctgcatattgggaacaacataatgggggagtgtacacctcctgcgatattaggagtaatatcatcttcttctgccctggttactaggagcaatatcacagaaggttgtataacccctgcgatattgggagtaatatcatccttccccccacgtatatcccagccttgatattaggaacaatattacaggggaggtgtataccccctgctataaggggagtaacataatcccctttcttcctggatactagcagcaatatcacaggggttgtgtacaacccctccgatattgaaagtaacttcatcttctttccctctgaatattaggaacaatatgatgcggaaggtgtacaccccctgtggtattgagagtgatatcattttctcctagcttggatattagaaacaatatcacaggaggggtgtacacccactgcgatatcgggagtaatataatcctctcccacccctggatattaggaacaatattaggatattaggaaggtgtacactccttggaatatttatagtaatatcatcgtttccttccctggatattaggaaaaatatcagaagggggtgtacacaccccagagattttgggagtaatatcaccctctcccccggatattaagaacaatgttattggaagtgtgtatgccttctgcgatatttggactcatatcattttctcccaacctaaatattaagaacaataccacagagggtgtacagctcctgcaatattgaaagtaatatcatcctctccttccctagatattaggaacaatatcacagggcgtgtacacctcctgcgatattgggagtaatgtcatcctttcccatccttgatattagaaaaatatcacaggggggtatacactccctacacaaattgaaagtaatatcctctccaccgctggatattaggagcaatataacgggggagggcctgtatacaccctgcaatattgggagcaatattattttctcctccactggattttaggaataatatcacagtgtgggtgtaaaccccctgcgatattgggagtaacatcatcctctttccccatggatattaaatacaatatcacaggaggggtctacactgtctttgatattgggagtaatattattctttctcttccttgatataaggaacaatatcagagggggatatacaccacctgcaatattgggagtaatatcatcctttccctttctgaatattaggaacaatatcacaaaaaaggtgtacactgcctgcaatactgagagtaatataatcctctcccttcctggatattagaaacaatatcccaaaagggatgtacactcccagcgatattgaaagtcatataatcgtttccttccctggatattatgaagaatatcacagggtgggtgtccactttctgcgatattaagagtaatatcatcctctctcctcctgaatattacgaacaatatcgcatggaggatgtacatcccttgcgatattgggagtaatatcctcctctctcccccttgatattaggaacaatatcacgggggagcggtgcacacaccctgcgatattgggactaatgtcatttccccccacccggatcataggaacaatataacagggaaagtgcacaccccctgcgatattgagggtaatatcatcctctcccgccctggatattaggaacaatatcacagggcgttgtacacctcctgcgatattaggaacaatatcatgctgtccccttctgtatattaggaacagtatcacagggggttgtacaccccctgcgatattgggagaaatattatccccttctcccctgtatattaggaaccatatcacaggctgtgtgtacaccccttgtcatattctgagttagatcatcctctccccctctggatattaggaacaatatcataggcgtgggtacaccccctgcaatattaagagtaatatcatcctctccctccctgaatgttaggaacaatatcacagggggaaagaaccccctgcgatatttggagtaatatcatactctccccacctgtatattcagaacaataacacaggggatttatacatcccatgcaatattgaaagtaatatcatcctctctccatctggatattaaaaaagaatatcagaggggggagtacacaatacatcccctttgtattgggagtaattttatcttctctctttttaaatattaaaaacaatatcaccggaaaggtttactccctctgtgatattgaaagcaaaatcatcctctaccccctggatgtaagaaataatattatggggagggtgtacatcttctaagatattgggagtcatattactttctcccctcctggatattagaaacaatatcacggggagggggtacagacccagcaattttgaaaatagtattatcctaactcttcttccgctggatattaggaacaatatcgcaggggttgtgtaaactccctgtgatattgaaagtaatatcatcctctccctccctggatattaggaccaatatctcaggaaggttgtacaccctttgcgatattgggagcaatattatcctcttccaccccggatattaggaacaacatcacagggtggggtacaccccctgcgatattaacaataatatcatcctctcctcccctggatattagaaacaatatcacagggatgcgtacaccccctgtgatattgaaaataatatcatcatcttttcctctggatgttaggaacaatatcacacagggggtttacaccgcctgtgatattgggagtaatatcattctctcaatccctggatattaggaacaacttcacagggggagtgtacaccccctgcgatatcgggagtattatacccttctccccctgtgaatattagaaacaatatcacagggaatctgtacatcccctgtgatattgacaataatatcatcctctctcccccagatattaggaacaatatcatagaacgggtgtacacccgctggaatattgggagtaatatcattttctccacccccggatattagaaacaatatcacagaaccagtgtatacgccctgcaatattgacagtaatatcatcctctcttttcctggatattaggaacaatatcacaaaggggtgtacatgccctgtgctgctggaaatagtatcatcctgtgtcttcctggatattaggaacaatattaaagggggaatgtacaccccctgtgatattgggattaatatttttctttcccctcctggatattagaaacaatatcacagagagggtgtacccccctgcagtattaggagttatatcatcctgtttcgttctggatattaaagacaatatctcaaagggtgtgtacacccctttcagttttggaaggaatgtcaccctcttctctcctggatattaggaacaatgtcacaaagaggaagtacacaccctgcgacattgggagtaatatcatcctttttcccccttgatattagaaacaatatcccagcggggtgtacagcccctgtgatattgggagtaatatcatcctctctcctgctgcatattggcaacaatattacagagtgtatgtacaccccctgtgatattgggagtaatattctttctccccatgaattttaggaacaacatcacaaggcgggtgtacatgccctgggatattgggagtactattatcctctcacaccctggatattaggaagaatattacagcggggtgtacaccccctgtgatacttggagacatatcctctccccttctggatattttgaacaatatgataggtggtgtacagcccctgccatatggggaggaatgtcattttctcctttcccggatattacaaacaatatcacagtggggtgtacacccactatgatattgcaagtaatatcatcctctcccattctgaacattccacttccccctggatattacgaataatatcccggggcgggggtgtacaccccctgcgatattaagagtaatatcagcctctttcttctggatgttacaaacaatatcacagggaggtgtacactctctgagatattaagagtaataacatccttttttcctctggatatttgggacaatgtcacaggaggtgtacacactttgcgatattgggacagatatcatcccctccccctcttaatattatgaacagtattcaaaaatgtacaccccctgcaatattgggagtaacgttatcatctttaattctggatattacgatcaatatcagaagggggtgtacacctactttgatattgggagtaatatcatcctctcccccccgaatattgtgaacaagatcacagtgtggtgtatgtcccctgcaatactgggagtaatatctttctttccactcatgaatattagaaacaatattacagagggagtgtacaccccctgcgattttggaagtaatatcatcttctccacttccgaatattaggaacaatatcaaagggggggcctacactccctgagatgttgggagtaatagtatcctctcccctccctggatattacaaacaatatcacaggggagtgtacacctcctgtgatattgggagaaaattttctctcattccggatattataaacaataacacagtaatgtgtacaccgcctgcgatattgaaagtaatattatcctttttccctctgaatattgtgaacaatatcacagggaattgtacaccccctgcgatattgacagttatgtcatcctctttcccctaggatattatgaaccatatcacagggtggtgtatatcttctgcgagattcagaataatatcatcctcccttcttctggatattatgaacaatatcacagggagtgtacagtttttgtgatattgttagtaatatcatcctctccccttcttaatatcatgacaatatcacagaaaggtgtacaccacctgcaatattgggagtaatatcatcctctctacctctggatattacgaacaatatcacgggggggtgtacacttcctctcctcccctggatattatgaacaatatcatagagtgttgtacacaccctgcgatattgggagtaatataatcgtctcttcccctgaatattacaaacaataaaacaagggggtgtacaccccctgtgatattaggagtaatatcatcatttccccatctggatattacaaacaatgtcagagtaaggtgtacaccttctgcgatattggcaataatatcatatctccccttctggaaattaggaacaatatcataggggggtgtacacccactgtgatatttggagtaatatcactctctccttccctaaatattacgaacaatgacacaggagggttttcaccccttctgatattgagagtaatattatcctctctcccctggatattacaaaaaatatcacaaaggggtgtacaccctttgtgatatagggagtaatatcctctttttccctggatatcatgaacagtatcacataggggtgtaaaccttctgcgatattgagagtaatatcctctccttgcctggatattacaaacaatatcacaggagttctacaccccctgccatattgggagtaatatcgtcttctccttccctggatattatgaacaatatcacagagtggtgtaaaccttctgcgatattgggagtaatatcatcctctctttccctggacattacgaacaatatcacagaggggtgaacaccctccccaatagggcgagctatatcaccatctacacccctggatattacgaaccatatcaaagaagggagtacaccctccgtgatatggggagcaatatcaccctctccccttttgcatattatgaaccatatcacagggggctgtacacccttcgctttatgaagaacaatatcaccctcttcccgtctgggtattatgaaccatatcacaggggagggtgatccttccgcgatataaggagcaatatcaccctttcttcccctggatattacgaaccatatcacggggggtgtacaccccccctgatatgaggataaatgtaaatttctccccccatgaatattatgaaccaatccaggggggtgtacccccactgcgatatggggagcaatatcaccctctaaccccctggatattacaaaccatatcacagaggggtgtacacttctgggtattacgaaccatatcacaggggttgtacacccctcgggttatgaagagcaatattttcctctttcctcctggatattacgaaccatatcacaggaggatgtacgtcccccgcgatatggggagaaatatcaccctttcctttcctggatattaccaatcatatcacggagggtttacaccccctgcgatatggggagcaatatcactctctcctcccctggatattgcgaatcatataacaataaggtgtacaccttcctcgatgtaaggagcagtatcaccctctccactcctggatattacgaaccatattacatgggggtgtacactctccacaatatgggcagcaatattacctttttcttccctggatataacgaaccatatcacagaagggtgtacatcccctacaatatggggagaaatatcaccctctcccccacccggatattacagactataacacaggggggtgtacacacagaatatttacaatatcacagaaggggtgtacaccctttgtgatattaggagaaatatcattgcctccccttctggatattaggaatgatatcacggtgggggtgttcatgccctgaaatactaggagtaatacctttctctccccacccctgaatattaggaacaatatcaaatgggggtttacaccttctgtgattttgagactaataacctctcccccactggatattaggaaagacatcacgagggaggtgtacaccttctgcaatatagaaagtaatatcatcctctcctcctctgaatattaagaaccatatcacaggaggagtgcacactctctgcgatattgggagcaatatcatcctctttcttcctgaatattaggaagaatatcacagggaaagttatgcctgtaatcccaggactttgggaggccaaggtgggtggattatttgaggtcaggaattcaagaccagcctgaccaacatggtgaaaccccaactctactaaaaatacaaaaattagcctggtatggtgacagctgcctataatcccagctactccgaaggctgaggcaggagaatcgtgcgaacctgggaggcaaatgttgcagtgagccgagattgcgccattgcactccagtctgggcggcagagcaagactccatctcaaaaaaaaaaaaaaaaaaaaaaagaatcacgggggggtgtacacaccattcgatattgggagtaatatcatcccctttccccctaaatattaggaacaatatcacaggaagcgtgtacatcccctgcgatattgggagtaatatcacactttcttctcctaggtattactaacaatatcacagggggagtgtacatcccctgcgatattgaaagtaatatcatcctctttcttcatggatattaggaacaatatcataaaggtggtgtacaccccctgtgatattgggagtaatatcgtcctctccccccatcgatattaggaacaataacacagggttggtgtacaccccttgtgatatttggagaaatatcataatctccccaacctggatattaggaacaatatcacagaggggaggacaccccctggaatattcacagtaacatcatcgtttcctttcctggatattgggaataatattatcctctccaccctggatattaggaacaatatcacaagaggggtgtacaccctttgagattttgggggtaatatcatcctctcccaccctggatattaggaacaatatcacagggagggtgtacatccctctgagatattaagaataatatcgtcctttcccccatgggtattaggaacaatatcacgacaggtgtgtacacctattgtgatactgggaataatactatttcacccccccccgatgttgggaacaatatcacgggagggggctgtacagcccctgtgatattgggagtaatatcatcctttcatttcttggatattagaaacaatatcacggggggggcacactcccttcaatattaagggcaatatcactctctttcttcctgaatgttaggaaaaatattacaggggaatgtacacctcttgcaatatttggagtaatatctcctctccttttctggatattaggaactatatcaagggggggtgtacaccttctgcaatagtggtggtaatgtcatcttctttttccctggatattagcaacaatataacaaggaaggtgtacaccccctgcgatgttgaaagtaatattatcctctccttttctagatattatgaacaatattacagggaaggtgtacatcccctgcgacattgggagtaatatcatcctctcccatcctggatattaggaacaatatcacaggtggggtgtagacctcatgcaatattgggagtaatatcatcctctccctctggatattatgaggaatatcacagagggtttacctacagggtgtttaagatattgagagtaatatcatcccctccctaactggatcttttgaacaatatcacagaagggtgtacacttcctgtgacattgggagtaatattattcttcctcttatggatattacaaataatatcacaggttggtgtacagtctttgcgatattgggagtaatatcattctctcccccccggatattatgaacaatattacagtggggtgtacaccccctgtgatgctaaaagtgatatcatcctatcccctcctgggtgttaggaacattgtcacagagggggcacaacccctgagatattaggagtaatataattctctcccacacggatattacaaaaaatatcacagaggctgtacacacagggtgtttagaatattgagaataatgtcatcttctccctccctggatattacaatgaagagataacatccattactgctgctacagtggaggtacaactgatggtgtttgcattagtttcctgccatctgccatcatccttctggattttgaagataccagactggtgaattccgtgaaagagatgagtggaccaacactcgtctcgcagaagttggcaaggaatacatcaatttcctgacccttgcccttaggccattactctaacaggggtcatggtgatgtttccaaccatgggttttatgccagcaagaccttcatggccaacagcttctgaaagataacaatactcacctttgttcagtgctcagttacctaagcaaatgattgtaggtcttttccaagggaagctggagaatcccaaagttgtatacttcccttggttttgcatgaacctgcctcatgagaacccagtctctttttgaattagaccttcttatgtgagaactgtctcaggttttaactggatgaaggatgatgactttatatgagggctgctgacatctgtttctgttcctcttgatgatttctatttcctgttactgaagggactcacttgtctgccatttatatctgttgtccctaatgaaacatactctaagaggtaagtgctagatattgcaaagcagtcctcccctgatgcactctggcactggtgccagctccttatgcccaccttgcattgatggcaaagtgctggcctctgccattcccacatcttctcaccactttgttgctatgaatggagcccatctctgtaacagtgtggcctgctttaatgtctgacccatgaagaatgtccagcacttgatcttagccatgctggtgtccctctcactggggcagtggtcatgggcagccttttttttttttttttttttttttgagacgatgttttggtattgttgcccatgctggagtgtagcagtgcgactggggctcaccgccacctccgcctcccaggttcaagcaattctcatgcctcagcctctggagtagctgtgattacaggcgtctggcacaacacccatctaattttttgtgtttttagtagaggcagggtttcaccatgttggcgaggctggtctcaaactcctgacctcaggggattcacccaccttggcttcccaaagtgctgggattacaggcatgagccaccctgcctggccatcatgggcagtcttaaggatgatagtcagctcctggttcttcttctatagtagacccagtccaagatgcccactgatcgagtttggatctgtgtccccacccacatctcatgtgtaattgtaatccccaatggtggaggtggtcctggttgggccggtgagaattgagtggatcatatgggtggatatttcatgaataatttagcaccatcctctaggtgctgtctggtgatagagttctaaaaagatctgattgttcaaaagtgtgcagcacctctcctaccactagctccagctctggccatggaggatgagcctgattcccttgtgctttttgccatgactctaagttttctgacgcctccccagaagttgagctgatggccagcatcatcctttttgtacagcctgtggaaccatgagccaattaaacctgagtttttataattaattacccagtctcaggtaattctttatagtaatgcatgaaaagactaatacatgtacttctgaaccatgttattctttaccccaaagctatacatccttgcaattctgtgctgatcctaaccacctgcagtgagcccacactcctcaggttctgggcaaatttttccaccagcctaacctcacatccaatgctagccccagttttgcgatctcaggccactcacactaatctaaaacttgctgcaaattcaaaaggtcccatcactctcaggatgactattcagatagcaacactcatggaactaaaaaaaatcactggggtggggatcacatcccggcatttatagagtgactacatcccagacatgtgaagaaaactgaggagggaaccccaagggcttgaaagaccttgccgagtgtggagccctgaagtgcacataccactcggttgtcccccaggggcctgggaaccttgccaagtgcggggtctctagagcagaatccacaccgctggggaggtggatttcaggccagaaaccttcagggacctggagtcccaacacatgctaaaaacaggggtaggggcacagatatgaaagattttggagtatttggagcccagaagagaaaactgaaggtggcagcgtggagcgctcagaagatggcggagaccatggagcccaaaaaatccagaaaaagaggcggggacaggggatggacctcagaagcattcagaacgcacagggccccctccaaggtcgctttcacactgccaaggcttcctctgcagctgcagagctgcacttttcctctgtcccaacaaaaatatgtcccttgaaggtctcatctcccatggactggatctggatctgggcctcatttatccaggggcctcagtcctcaaggaggccattgtcactctgcttcccgataaagtcctcttaagttagtaaatgcccctcaagggacccatggtttgtccttattcctccctgagtcttctccttctgagggaggaagttttcaaacacccccaggatttactgccagaatttcaccctctgaaacctcctccttccctagatccagtccagctcctcatcctcagccccccagaccccatggaggtgtcccatgcaatgggttttttctagattgacagcctcccctcctcagcgtacaactcagagactcaccctgttctgagcagcgagccaccgcataagcagacatgagacctcactccagccaaataacactttatttttgtagtttcaatgcttttcttccccgaggaaagggaggagctcaggagaacagtgtcatcaaaatttcctggtggttgtttaatcacagcagcagagtaggtcaggaaactcttccagattaccctcttcctcctgaaattaaaggaaacatgcacgactcatgaactgataaggtttcccaacaattgtgcgaatatcctgctggatttatgagctgaaagtaaacctgaatgacttgtgctgcttgtccaggcattatcttcttcaggaaatatgagatgttgtttggaagcatttcagaagcaagggaagctgctttgttgaatacatagatgagcatcttcttgattagaaacttcaacccagcgattaagggtctcgttactagttttgagacatatgtcattaattggtcggcaaaccatttttttatcacatccatcagaaaatcgaccactttctccactagcatttccatggccatgttcattataagtgaagtaaatgagctcacaaaaagtgtaatgagtgttctgtcggtttcacgtaaagatatataatggtatcgtccctggagagcgtggccattttatgggaggtgacgtggagggggcgggccaagatggccaattagaagaggctgccttccactgaattaaagtctcagtgaatttcacgataagcacgtgaactgaaatattcaggttctcacattgggactgactaggcaaacaacttgacccaggagaacaaagaaaacaggggtgggtgatgaaccacgctatattggaacagagccaaaggaaccttcttgcacagccaagagaagccatgagtgtgtgaccccgccccagaaaccatttttctcccttggatctttgcaaccaagaaatcaggagatcctcccatgggctgagtcacggcggccttgggcctagtacacagggctgtgtggagtgttggcagagcagctgctcagacacagaccgagacccaggaggtttacacaatctagccttgagaaaccaggaaaggtgggagttccgttggtacattcccccagtaagggggctgaattcaggtgttatacgagttgttaagaaattattttgggcagacagggaggaaaaggggtccttgggaagttttgtttcttcttaaagcagctccagaaatgagtcttgtctagcaggaaagccccggcttttagagttctccggtaaccttgatctgcagatgccggccattagaaactgggtccacccaaacatagcgattcccgccctcttctggcccttgtccccacctgtgcctggcgatatggccacccccatatatccccatgagtgtaggaaatcagggtgtccggcacgtgcatattcaaaggctaggtgggagggccagtttttccgtgggccacataaatgacatgcctggtcgaaccaatcgcctgaaccctatgcaaatcagacaccaccccctccagtttcttcatataactcattggtatccacagcactccgggtttcctcttttggctttggagcccccctccctctgtctcagtatggggagctcttccttcgttcttgcctattaaactgcacgccataaaaccactgtacatgtgtttgtgtcattttctccaattctgtgtgagacatgagccctggtgttcctccactcatcacagccatatcacagggagccagacagcctcatcctgtggtccccatcatcacagcacttctcaagtcccacgggcttggaataccagccaagcagtggcaagatagcaagccaagtgcctgagactaccgagttctgggtggttggggcggccaccgtctctgtttccgtagactcagacaatctagccttcgggctccagggagggcagctggtctggagcaggaggggtcccccacaaggcagcactgctgctgtgcctgatagtggccagactgtttctttaaatttgaccttgattcatccctcctcactgggaaggtcctccctgttggaatttcaggaactccagccagggttatagggttggtgggaagcctgatctctttctgggttggaggtcctccggggatgggcggctgccatctttgtaattgtggactcaaccttttcagctgaagcaaatgaacaaagctgggagcatcacatttcctaactctaaaatatattacacagccatagtcaccaatacagcatggtacaggtataaatgtggacacacagattgatgtaacagacgagagaatccaaaatgaaagccacacattcataggcaactgatctttgacaaagctgacaagaatatacactagggaaagcacacccttttcaataattggtactgggacagttgcattgtcatatgcggaagaataaatctgaactcctatttcttaccatgtttacaaaaatcaatttaaagtgaattatagactgaaatgtatgtactgaaatggtcaaaatatcagaagaaacttagggaaaactcttctggtcattgtccagtaaagagttcacgagtaagacttcaaaagtacaggcaacaaaaccaaaaagagaccaatgtaaatttaaaccaaactaaaaattttaattaaattaaaaagccatacaccatttttctatctcatccctaagaaaatggaccacgtcatccactagcatttccatggcaccttcattataggcgaagtaagtgagcccatgataagtgtaatgagccttctgtttatttcaggcgaagttaagtaatggatattcctggagtggtgtggattttacagaaagtgacgtgaagtgggcaggccaagatgcccaatgagaagcagctgtcttcccctgaatgaaaagcacggtgaattcagcaccttgaactgaagtatccaggttcctacattgggactgattaggcaaatgacttgacccaggagaagaaacaaagggggtgggtgatggtgcacccagtatcagcacagagccaaagaaaccttcacctacagccaagagaagcagtagtgaatgcacaacccctacccacaaaccatgtttctcccatgcatctttgccacgcatggatcagaagatcctcccattagctcatgccataagggtcttgggtcagatacacagagccgtgtcgaatgttgccagagcactcgctcagacactcacagagactcaggagttttatatacttggaaagctgggcaaggcgggagttccatctgtacattcccttagaaaaggggctgaatccagggagccaagcagcctcattccgtgggccccacttccacagcacctctcaagttaagacccactggcttggaatagcagccaaccagtggcaatcggctggagactgcctgagactacagttttctggggaggtgagggcggcctccatttctgtgtttccatggactcagacattctagcctgcaggctccagggaatccaggtggtctggtcccccacaaggcagcacagctgctgtgcctgattgtggccagacagattccttaagtaggaccttcattcatcccccctcactgggtagggcctccctttgggaatttcaggagttccagccatggttatatggtcagtgggagccatgatctttttccgggaaggagccctgcgaggaggggcagcttcatctctgcagctgttgactcagcctttctgaagcaaataaacaaagctgggagcatcacatttcttgacttcaaattatattacaaagccatcatcaccaatacagcatggtagtagtatacagatagacacacagattgatgtaacagactagagagcccagaaagaaagccacacatttatagccaactgatctttgacaaagctgataagaatatacgttgaggaaagcacacccttttcaataattggtgctggaacaattgaattgtcatttgcagaagaataaacctggactcctatttctcactatttctacaaaaatcaattgaagatgaattatagacttaaatatatgtactgaaataataaaaatgtgagaagaaacctagagaaaactcttctggttattgtctagtaaagagttcaagagtatgacttcaaaagtacaggcaacaaaaccaaaaatcgaccagtgcaaatttaaaccaaactgaaaattttaattatataaattcaaaagctttactgaaacaaaaagctgctgcacagccaaagaaataatcctctcaacagagtgagcagacaaactgcagaacggaagaaattatttgtaaacttttcctttgacaaaagactaataccgagagtaaacaaagatctcaactacaacagaaaactccaaagaatcccattaaaaagtcggcaaaggacataaagagacttttttattttttatcttatttatttattcatttgtttttatgagacaggtctttctctattacccatgctgtagtgcagtgccatgatcttggctcactgcgacctgtgcctaccgggttcaagcaattcctgtgccttaacctcctgagtaacttgcaccacaggcacgagtcacagcccgtggctgattttttgtatttttagtaaagatggggttttgccttgttggccaggttgatttctgcctctttgcctcaagtgatccattggcctcagcctcccgaagttctggggttacaggcatgctcaaccgcacctggacaggagtcagtttttaaaagagcacatataaatggccaaaaggtatttcaaagaaattctccacaccatgaatcgtcagagaaatggtcattaaaaccacattgaggttgggtgcgctgcctcatgactgtaattccaacactttgggaggctgaggcaggtgtatgatgagctcaagagactgtgatcatcctggccaacatggtgaaaccctgtctttactaaaaatacaaaaaatgagccaggcctgttggcacgcgcctgtagtcccagctactcgggaggctgaggcaggagaattgcttgaacccgggaggtggaggttgcagcaagccacgatcacaccactgcactccagtctggcaacagagtgagaccccgtctcaaaaatatcaacaaccaccacaatgagatatcttactccagtcagaatgggtattatgaaaaagacaaaaacataacaaatgttagtgagaatgtggagaaaaggggaaatcttatgcattgttgttgggaatgtaaattagcgcagattttatggcaaacactatggagatttctgaaagaacaaaaaatataacaactactcagtcctgcagttgcagtactgggtacctactcaaaggaatagatcaaaatgcacacaaatatttgctgcagcattatttacagtagcaaagacatggaatcaccctacatgtcaatcaacagaagaataaataaagaaaatgtggtatgtatacatacaggaatactattcagttataaaacagtgaaaatcatgtcttttgcagcaacctggaaggaactggaggtcattattttgggtaaaacaagccaggcagagaatcccaaatatcacatttttcaggaccagcagggtatttcacacctgtaattcccatgcttttccaaaacagtataagagaattgcttgatgactgggtgacacagtgagaccctatctctgcaaaaacaatatatgtgtatatatatatatatatggagagagagaaatcagctgggcatggaagctgggactacaggtgcgtgccaccacacccgggtaatttttttgtgtgtttttagtagagattgggtatcaacaggttgctctgagtggtcgtgaactcctgagctcaggcaatctgccctccttggcctcccaaagtgctgggattacaggtgtaagccaccactcacagtcttccttccttcctcccttcaggtgattgctcagatgctgcttattcttggaggatatccctgaccaacttatagaattagcgggaaccttatggttgacacatttcctatgttcctcacctgctttcttttcttgtggaggacttacagctgtctgaaatacagcatgtttctttcttgattgcctttctctcctcccgagaatatcagttgcacgaggccagtgactgtttctctcttttctgagtctcctgcaaccaccggtagcatacacatagtgtatccttaatatctccttgttcaaaaggtgaatttcttgaagctggggggcagaggttgcagtgagctgagattgtgccacttgattccagcctgggcgtaagagcaaaacttggtttctggctggggggaaaaaggataaatttctctattcatgaaaaattggacattgggaatcaagtatagccaccttagtttttcagtgataattccagccctgtcaacttgtaggaatcatgtacgatggttccctttgctggaggctattgctgtgtaataaaatatccctaattagtaggaaagaataaccatcattgatttgtgctcacaaatgctgtgaacaagaggttctgatgaggagagtggagatgacttctctgtgtgatctcagctcactgcaacatttgtctcccaggttcaagcttctcctgcctcagcctcccaagtaaattggattacaggcacatgccagcatgcttggctaatttttgtatttttagtagagacagggtttcatcatgttgaccaggccggtctcaaactcctgaccccaggagatcagctcgcctcagtctctcaaagtgcaggaaatacagatgtacaccactacacccactcttaagtttttacttatgaataataacactgacagtgttctaaattctctaaatggtcaaatggataaagaaataagacccaacttatggtgccttaaagaaatcaacttcatctatagagacaccgaaagggaaatgaaaacagggaaatggaaaaggatatttcatgaagctggaaaccaaaaaagtgccagagtagctattctcatattagataaaatagactaaaatcacagactgtaacaacaaaagacaaggagggtcactagttaatgataaagaggtaaatcggcaagaggataccacaatgattaatacctaggtacgtgacaccagttttttcaaatgtaaaaagcaaacatagattgccattccaagatggccgaataggagcaactccggtctgcagctcccagcctgatccacacagaagatgggtgatttctgcatttccaactgaggtaccttgttcatctcattgggctggttggacagtggatgcagcccatggagggctagctgaagcagggtggggcattgcgtcaccgggaagcacaaggggttaggggatttacctttcctagatgagggaacccgtgacagactgtactgggaaaattgggacactcccaccttaatactgtgcttttccaatggtcttagcaaatggcacaccaggagattatatcctgtgcctggctcagtgggtcccacgcccatggagcctcgctcactgctagcacagcagtctgagatggaactgcaaggcggcagactgggtgggggaggggtgttcaccatttctgaggcttcagtaggtaaacaaagtggtctggaagctcgaactgggaggagcccaccgcagctcaatgaggcctgcctgcctctgtagactccatctgtaggggcagggcatagctgaataaaaggcagcagaaatttctgcagacttaaacatccccatctgacagcactgaagagagcagtggctctcctagcatagtgtttgagctctgtgaatggacaggctgccttctcaagtgggtccctaacccccatctagcctaactgggagacacctcccagtaggggccaactgacacctcatacagccaggcacccctttgagacgaagcttccagaggaaggatcaggcagcaatatttgctgttgtgcaatatttgctattctgcagcctccgctggtgatacccaggcaaacagggtctggagtggacctccggcaaactccaacagacctgcagctgaggaacctgactgttcgaaggaaaactaacaaacagaaaggaacagcatcaacatcaacaaaaaggacatccacaccaaaaccccatctctaggtcaccattatcaaagaccaaaggtagataaaaccacaaagatggggagaaaccagagcagaaaagctgaaaattctataaaccagagcacctcttctcctccaaaggatcgcagctcctcaccagcaatggaacaaagctggatggagaatgactttgacaagttgacagaagcaggcttcagaaggtcagtaataacaaacatctctgagctaaaggggatgttcaaacccatcacaaggaagctaaaaaccttgaaaaaagattagacgaatggctaagtagagaaaacaatgtacagaagaccttaaatgacctgatagagctgaaaaccatggcatgagaactacatgatgcatgcaataccttcagtagccgatttgatgaagtggaagaaagtatataagtgaatgaagatcaaattaatgaaatgaagtgagaagagaagtttagaggaaagagagtaaaaagaaacaaacaaagcctccaagaaatatggaactatgtgaaaagattaaatctacgtttgattagtgtacctgaaagtgatggggagaatggaaccaagctggaaaacactcttcaggatattacccaggagaacttctgcaacctagcaaggcaggccaacattcaaattcaggaaatacagagaatgccacaaagatactcctcaagaagagcaactccaagacacataattgtcagattcaccaaagttgaaatgaaggaaaaaatgttaagggcagccagagagaaaggtcgggttacccacaaagggaagcccatcagactaacggctgatctcttggcagaaactctagaagccagaagacagtgggggccaatattcaacattcttaaagaaaagaattttcaacccagaatttcatatccagccaaactaagcttcataagtgaaggagaaataaaatcctttacagacaagcaaatgctgagggattttgtcaccaccagacctgccctaaaagagctcctgaaggaagcgctaaacatggaaaggaacagtcagtaccagccactgcaaaaacatgccaaattgtaaagaccatcaaggctaggaagaaaccgcatcaaccaatgagcaaaataaccagctaacatcataacgacaggatcaaattcacacataacaatattaaccttaaatgtaaatgggctaaatgctccaattaaaagacacagactggcaaattggataaagagtcaagacccatcagtgtgctgtattcaggaaacccatctcacgtgcagagacacacataagctcaaaataaagggatggaggaagatctaccaagaaaatggaaaacaaaaaaaggcaggtgttgcaatcctagtctctgataaaacaggctttaaaccaacaaatatcgtaagagacaaaaaaggccattacataatggtaaagggatcaattcaacaagaagagctaactatcctaaatatatatgcacccaatacaggagcacccagattcataaagcaagtcctgagtgacctacaaagagacttagactcccacacaataataatgggagactttaacaccccactgtcaacattagacagatcaatgagacagaaagttaacaaggatacccaggatttgaactcagctctgcaccaagcggacctaatagacatctacagaactctccaccccaaatcaacagaatatacatttttttcagcatcacaccacacctattccaaaattgaccacatacttggaagtaaagctctcctcagcaaatgtaaaagaacagaaattataacaaactgtctctcagaccacagtgcaatcaaactagaactcaggattaagaaactcactcaaaaccgctcaactacatggaaactgaacaacctgctcctgaatgactactgggtacataacaaaatgaaggcagaaataaagatgttctttgaaaccaacgagaaaaaagacacaacataccacaatctctgggacacattcaaagcagtgtgtagagggaaatttataacactaaatgcccacaagagaaagcaggaaagatccaaaattgacaccctaacatcacaattaaaagaactagaaaagcaagagcaaacacattcaaaagctagcagaaggcaagaaataactaaaatcagagcagaactgaaggaaatagagacacaaaaaacccttcaaaaaattaatgaatccaggagctggttttttaaaaggatcaacaaaattgatagaccggtagcaagactaataaagaaaaaaagagagaagaatcaaatagatgcaataaaaaatgataaaggtgatatcaccactgatcccacagaaatacaaactaccatcagagaatactacaaacacctctacgcaaataaactagaaaatctagaagaaatggataaattcctggacacatacaccttcccaagactaaaccaggaagaagttgaatctctgaatagagcaataacaggatctgaaattgtggcaataatcaatagcttaccaaccaaaaacagtccaggaccagatggattcacagcccaattctaccagaggtacaaggaggaactggtaccattcctcctgaaactattccaatcaatagaaaaagagggaatcctccctaactcattttatgaggccagcatcatcctgataccaaagccaggcagagacacaaccaaaaaagagaattttagaccaatatccttgatgaacattgatgcaaaagtcctcagtaaaatactggcaaaccgaatccagcagcacatcaaaaagcttatccaccatgatcaagtgggcttcatccctgggatgcaaggctggttcaatatatgcaaatcaataaatgtaatccagcatataaacagacccaaagacaaaaaccacatgattatctcaatagatgcagaaaaggcctttgacaaaattcaacaacccttcatgctgaaaactctcaataattaggtattgatgggacatatctcaaaataataagagctatctatgacaaacccacagccaatatcatactgaatgggcaaaaactggaagcattccctttgaaaactggcacaagacagggatgccctctctcaccactcctattcaacatagtgttggaagttctggccagggcaattaggcaggagaaggaaataaagggtattcaattaggaaaagaggaagtcaaattgtccctgtttgcagacgacatgattgtatatctagaaaacccattgtctcagcccaaaatctccttaagctgataagcaacttcagcaaagtctcaggatacaaaatcaatgtacaaaaatcacaagcattcttatacaccaataacagacaaacagagagccaaatcatgagtgaactcccattcacaattgcttcaaagggaataaaatacctaggaacccaacttacaagggatgtgaaggacctcttcaaggagaactaaaaccactgctcaatgaaataaaagaggatacaaacaaatggaagaacattccatgctcatgggtaggaagaatcaatatcgtgaaaatggccatactgcccaaggtaatttatagattcaatgccatccccatcaagctaccaatgactttcttcacagaattggaaaaaactactttaaagttcacatggaaccaaaaaagaccccgcattgcaaagtcaatcctaagccaaaagagcaaagctggaggcatcatgctacctgacttcaaactatactacaaggctacagtaaccaaaacagcatggtactggtaccaaaacagagatatagaccaatgcaacagaacagagtcctcagaaataatgtcacatatctacaactatctgatctttgacacacctgacaaaaacaagaagtggggaaaggattccctatttaataaatggttctgggaaaacaggctagccatatgtagaaaggtgaaactggatcccttccttacaccttatacaaaaattaattcaagatggattaaagacttacatgttagacctcaaaccataaaaaccctagaagaaaacccaggcatttccattcaggtcataggcacgggcaaggacttcatgtctaaaacaccaaaagcaatggcaacaaaagccaaaattgacaaatgggatctaattaaactaaagagcttctgcacagcaaaagaaactaccatcagagtgaacaggtaacctgcagaatgggagaaaattttcacaacctactcatctgacaaagggctaatatccagaatctacaatgaactcaaacaaatttacaagaaaaaaacaaacaaccccatcaaaaagtgggtgaaggatatgaacagacatttctcaaaagaagacatttatgcagccaaaaaacacatgaagaaatgctcatcatcactggccatcagagaaatgcaaatcaaagccacagtgagataccatctcacaccagttagaatggcgatcattaaaaagtcaggaaacaacaggtgctggagaggatgtggagaaataggaacacttttacactgttggtgggactgtaaactagttcaaccactgtggaagtcagtgtggcgattcctcagtgatctagagctagaaataccatttgacccagccatcccattactgggtatatacccaaaggattataaatcatgctgctataaagacacacgcacacgtatgtttattgcggcactcttcacaatagcaaagacttggaaccaacccaaatatccaacaatgatagactggatgaagaaaatgtggcacatatacaccatggaatactatgcagccataaaaaatgatgagttcgtgtcctttgtagggacatggatgaagctggaaaccatcattctcagcaaactatcacaaggacaaaaaaccaaataccgcatgttctcactcataggggggaactgaacaatgagaacacatggacacaggaaggggaacatcacacaccggggactgttgtggggtgggggaggggggaaggatagcattaggagatatacctaatgctaaatgacgagttaatgggtgcagcacaccaacttcacacatgtatacatatgtaacaaatctgcacgttgtgcacatgtaccctaaaacttaaagtataataataataaaattaaaaatgaaatgaaataaaataaaataatgtgttgtaagatggtatttgcaaacttcacggtcacctccaaccaaaaaaacctactattttcttttattatactttatttatttacagatgatgtatttatttacatcattatttacagatttacagatgatgtatttatttacatcattatttacagatgatgtatttatttacagatgatgtatgatatctcctttaagtgggtaaaaatttgagagcagaaaactcttgttttgtttgttgccatatccataacacctggcccaaggcctggcatgaagtagctgctttgtcaatatgccattgaatgaatatttgaatgaatgaatgaactatgtggtttgggtaatcctcactgagaagattacatgcaagctgagacctgaatgataaaagaagatcattcaggagatctgggagatctgggtgaagaggatatggcttgaagccactgcacgtgcaaaggccctgaggcaggggtgagcttcgcagggaggtggagcagcaggcaggaggccagtgtggatgaatccaagggagtgaggggaagagtgggaaaggatgagggccaggtctagaccaggatgaggcacagaagggttttgccactttctccactgacagtgaagccttcgtgctcaccctgtgagtatgggtgcacgtgtgatgtcgacaactaaggtgtgtggggaaggtgaatttatttgaatttattcaaaacttgataagcaaatttatgaaaagttaacttatcttgtcttatcaacccaggactaatgtttcaataattagcttggaaaaatgaggagttagcctctatgacttgtgtaatagcagtgaaagctctctgttccaggttagggagggatggagtagcccagtttcagaccccaagtgggtgaagaggtgtccatgggagagtgtctcagtgtgagtgtcagagcccatacaagagtagagccctccatggaggtgccacttggggtgggacctcagagtccgagcaggccatgaggccatccacacaggggcagtccagcacatggagtcagagtcaggcatggagaaaaggacatcattaatagggcctctggatgtcatacccttctcagactaagtatttctgccctaattatataccaggatctgaccctcttgcagatgatagtcaatgattcttgacaggagagtaattgcaccacttttctggtggtctcttgacgcaagagaacaaacacactgaaaagaaatggcaagtcaacgtttaaagcaacttctttgtcccttgttgaaaccattctctttctggggtatagacctctaaacccagaactctaacatcttttttgttcgttttttgttttttttttcaagacagaagttttgttctgcttgcccaggtggagtgcaaaggcaggatcgggtcactgcagtctctgccttttgggttcaagcgattctccagcctcagcctcccgagcagctgggattacaggtgctggccccaataccttgctaatttttgtatttttagtagggacggggtttcaccatcttggccaggctggtctcgaacttttggcctcagtggattcacctgtctaggcctcccaaagtgttggcagtacaggtgaaagccactgcacccagcccacaacactaaaatctacaaggatgggaagcccaaagctttcaaatgggcttcgtggatgaaggtgaatgagtgggaatattcccatttcccccatctggatcacaggcccatgtgttccaacttgtagaaatacaggaccataaaatggcattttcctttttattagaggatatgcccagcatgcctcaggctgttgcatttctgaacacttcacagatatggcacatcgctgaaaggcagagacatggaaaatccccatgaccatcaaactcttacacttcagtatagatttgttatgagcagagctaggactacaaggaatgtcattctcaccattggatgtcattggtatcagtgtcgacaggtatgcactttcagcctttggaactcgctgtgtgatccttaggttttcagaaaccttaccatttcctgtccatcagacctggtaatgacattgttatcagtagaatggagattgggctgggtgcagtggctcaggcttgtaatctcagcactttgaggccaaggtgcttggatcacttacgctcaggagtttgagtccagcctgaataacatggtgagagcacgtctctacaaaatatacaaaaactagcccagcatgtcgctgtgtgtctgtagttcaagccacttaggaggctgaggtgagaggatgccttgagcctggaagctcaagactacagtcagcccagatagccccactgtacgtcagcctggctgatggagtaagatgttgtctcatcaacaacaacaacaacaacaaaatttgaatggagaatggagctgtgtattatgttgcagaatgttctgatgggcttggttcctcaggactacttggatggctaatgagagagacgggaagacagagagcttgagattgtgaataaatactgctgttgttctcatgtcaatgccaatattacagatccaccttcctgaagagttttgcaaaacatggattttgcagaccaacaatgcatacagtgtgaccgaggttgtgttatttattgctatggtgagagaaaacatccatcacagctgctacagtggggtcacacctgatgacgtttgcattaccttcctgccatctgccatcatccttctggattttgaagataccagactggtgaattccatgaaacagatgactggacccacagcactggtccttgagtttttgatggtggtgctcatctctgccatctatatacaggaaataatttgccttgagatttgatattggtttttattgattatgttgtcttggatgagcattgatagacttaggctttccatttgcaattgtttttttcctaaaattataagtcatagctcacaggccacaaaaacactgtaagtatttttcctgtttctaagtctatgactcctgattatacatgagagcctaggaacataaccacagaggagagaggttcacaaacagagttcactcacttagaggcagaagttggcaaggaatacatcaatttcctgacccccacccttaggccattactctaacaggggtcatggtgatgtttccaaaccatgggttttatgccaacaaggccttcttggccaagagcttctaaaagacaacaatactcacctttgttcagtgctcagttacctaagcaaatgactgtaggtcttttccaagggaaactggagaattccaaacttgtacaccttccttggttttgcataaacctgcctcatgagaacccagcctctttttgagttaggccttctcgtgtgagaactgtctcagattttaactgtatgaaggatgatgactttctaaggggctgctgacatctgccttctgttcctcttgatgatttctatttcctgttaatgcagggacacacctgtctgccatttatatctgttgtcgctaatgaaacacgctctaagaggtaagtcctagatattgtagggcagtccccccgtgatgtactctggcactggtgtcacctccttatacccccttgcattgatggcaaagtgctggcctctgccattcccacatcctctcaccactttggtgctatggatggagcccatctctgtatcagtgtcccctgctttgagctctgacctatgaagaatgtccagcccttgcatctcagtgatgctggtgtccctctcactggtgcagtggtcatgggcagtctttttttttttttttttttttttttttgagacgaagttttggtattttttcccatgctggagcgtagtggtgtgattacaggcatccagcacaacgccggtctaattttttgtatttttagtagagacaggttttcaccatgttggccaggctggtctctaactcctgacttcaggcgatccacccacctcagcctcccaaagtgctggggttacaggcatgagtcaccccgcccggccatcatgggtagggttcaagatcatagtcagctcctggttctccttctatagtagacccaatccaggatgcccactgattgaggttggagctgtgtccccacccacacctcatatggaattgtaatccccactgttggaggtggggctggctgcgctggtgacagttgagtggattatggaggcggatatttcatgaataatttagcaccatcccataggtgctgtccggtgatggagttctcaaaagatctacttgtttgaaagtgtgtatcacctctcctaccacttgctccagctctggccgtggaagatgagcctgcttcccttgtactttttgccatgactctaactattctggggcctccccagaagttgagctgatggccagcatcatactttttgtacagcctgtggaaccatgacccaattaaacctgagttttataaataattacccagtctcaggtaattctttatagcagtgcatgaacagactaacacatgcacttctcaactatgttattctttaccccaaagctatccatctgtacaatttggatctgagcctaaccacctgcagtgagcccacactcctctggttctgggcatatttttccactagcctaacctcacatccagtgctagccccaatttggcaatctcaggtcacttacactaccctccaacttgccacaaattcaaaagttcccatcactctcagggtgactatggagctagcatcattcacacaactcaaaaaaatcactctgtttgttttacagtgttataacagctaaaatatacaaatccaaagaagccaaagagacaaacaaatagggctgggtcagaaaggatcccagacagatgactccactgcctcctcaaggcagggtgagggggaatgcatctcccggctccactgatgatggtctctttgtgatgaagctttgttcctgggtctcagttgtacatgtcctttggctctaggagaagatgatgctttccaactctcaaacctgatttatttcttatttttttggaagcagaatctcactctgttggccaggtgggagtgtgtgcagtggcacaatcatacctcattgtaacccctaagtccctgactcaggtgatttttttatctcatgctccccattagctagatctacaagtacaggtgcgtgccaccaagcccatctaatttttaagaaaattttgttgtagagatgaggtcttgctctggtgtccaggctggtctggaactcctggactcaaaagatcctacctcttcaagcttcccccgaatctctggattatagatgtgagccaccacatctagtcccaactctcacactttaaattgctgagtgacaggtgacagcctgacttttcctctttcaatgcatcaatggcactcgtttgcagccatccaattccacattcatatcgctattatttacctacaatcttccaaaccaaaagcaatgtaccttcagtgcttctaccgtagttcatccaaaattaccccaggtgaaacatcggtggtttcacagtggtcacatgccctagcgactctgtcctccaactgccagcagtgattgttgctcactgaagtcctgtggggagtcatccaaccccagaatccatacttagggttgacttcccaggaccattgccagtagcaattgatagctcatggtttctagaagcagagcatgagatagggaatcaagatgtgcattgagggagtgctcccgatagctcaggcagggcagctcaaggaaaccaggtaacatcaggtctggctgaagacctgcttaagcctgatcccaagcaggctctggagcacagccttcagcacagaggtggcctcatcttggtcaccctgaggtttctgtgccagtgattccctggctgctagctgttgccaggaagggggtgattaacaaccatctgggccatgtgactgcacgacaactgagtgcaaatctctctaggagaggcacctaccaggtgtgaaggaggatcctggggaagggggtctgggcacagccattcctgtaaatggctttcaggaaacacatgagaatctttgggatgttggaaattaggggtggacattgagagaacaaaatgtccatggaaaatattataaatgtccatggaaagacaaaacgctgggcagaaaggcagtgaaagatcataagggctccataacgtcctccgtgtgacaaagagttcattaagacaagggaggaaccctagaccctgcttaaaaggacgtggcttcagggagagctcctgtgggcacactcagagttgaggtaaaactcctgggattttgtctaattccagtgtactgggtaggggtagacttttggcaatgtgaggtcaggggtatcagatgaaggggtcaacaaatgcctggacaggattcacgaagatgagagggacgttcgaattcctaaaaagctggtggtcaaaagaatgaggatgaagaggagggtgtcctgaaacctcggagccagaagtggggctgaaggcaagaagcctttcaagggaagaagggagtttggaaagagatggatatcaggccagaaaccttcccccaacctggtgccccaaagcattctaaaaacgggggtgggacacagaagaggttgtctgagcagaggaggatcccggaagccagcgtgggggaaggaagagggtatgaggctggcatgaagtggggactagagaaagggtgagtagttttcagagaaaaggccagtgtccagggctgtccaggagcgaatctggtcacttgttctgaaacaggggtccgggtctggcagtggcagcatggtggggtgggtgagtggcactatggaagagccaaatctccacctctatcctcaaagcctttcttccacacagctttccggttagcaaggctccatgagaatggttagttcctgaaaatagtggaccccagaagggctgactaggagcgtgggcatagggagagggaggggatccagggcccggaggaccttgccagagcgtgtagcccgcagaattgaggaaacgagagtgggggtggggatcagatcccagcatttatggagtgactgcagcccagaaaggtggaaaaaactaagaaggggaccccaagggcttgaaagaccttgccgagtgtggagccctgaagtgcgcaggccactcggttgtccctcaggggcctgggaacctcgcggagtgtggagtctctagaacgcagtccactccgctggggaggtggatttcaggccagaaaccttcagggacctggagccccaacacatgctaaaaacaggggtagggacacagatctgaaagattttggagtacttggaaggcagaagggaaacttgaataagtcagggtggagcgctcagaagatggcggagacagccgagctggaagaatccagaaagagaggcggggacaggggatgggggctcagacgcattcagagcgcacagggcccctccaaggtcgctttcacactgccgggttttcctctgcggctgcagagctgcacttttcctctgtcccaaccaaaatgtgacccttgaaggtctcatcccccatggactgtatctgggcctcatttattcaggggcctcagtcctcaaggaggccattgtcactctccttcccgatagagtcctctcaaattagtaagggcccctcaaggagcccagggtttgtctttatccctccctgaaacttcttcggaaggaggaagttcccaaacacccccaggctttagtgccagaatttcaccctctgaaacctcctccttccctagacccagtccggctcctcatcctcagtccctcagaccccatggaggtgtcccctgcagtgggttttctccagattgagagcctcccctcctcagcacacaacccagagactcaccctgttctgagcagcgagccaccgcataagcagacatgagacctcactccagtcaaataacactttatttttgtaaattcaattgttttgttcccggaggaaagggaggagctcaggagaacagtgtcgtcaaaatttcctggtggttgtttaatcacagccgccgagtaggtcagaaaactcatccggattaccctcttcctcctgaaattaaaggaaatgtgcaggactcatcaactggtaaggtttcgtgacaattgtgcgaatatcgtgctggatatatgaatagaaagttaaatctgaacgacctgtgctgcttgtccagacatcatcttcttcaggaaatatgagatgtttctgaagagtttcagcagcttgtcaggaaaggactctgccttttccagtacatagatgagcatcatctggattagagacctcaacacggcgaatacaatttccgttgctagttttgggacacatgtcatgaattggtcggcacaccatttttctaacatatcggtcagaatactggccactttaggcactatctcttccttggccaggttctttataagtgaaataaatgagcccatgatatgtgcaatgagcgtgctgttggtttcaggcaaagttatataatgagagcgttcctggagagtggaggcattttacagaaggtcacgtggtgggggcgggccaagatggccaattagaagcagctgccttccactgagtgaaaagaaaagcccggggatttttttttttttttttttttttttgagacggagtctcgctctgtcgcccaggctggagtgcagtggcgggatctcggctcactgcaagctccgcctcccgaagcccggggattttgaagtcagcgcgtcaactgaaatattcaggttctcacattgggactgactaggcaaacaacttgacccgggagaacaaagaaaagagggatggatgatgattcaccctgtattggcagagagccaaaggaaccatctccggcatccgagggaaacagtgactgagcgtgtgaccccgccccagaaaccatgcttctcccatggatctttgcaacccatggatcaggagatcccctcttgagctcaggtcataagggccttgggtccaggacacagggctgtgtggagtgttggcagagcagccgctcagacacacatagagacccaggagtttcacatactctggccttgggatgccgggaaaggtgggagttccgtctatacattcccccaggaagggggctgaattcagctgctttaggagtttttaaaacattattttaggcagacagagaggaaaaggggtccttgggaagttttgtttctttttaaagcagttccagaaaagagtcttgtctagcaggaaagccctggcttttagagttctctggtaagctttgattggcaaatgctggccattagaaactgggtccgcccaaacatggggattcccgcccgcttctggcccttgcccctccctgtgtacacaccctgtgatattgggagtaatataatcctctcccctcctgaatattacgaacaatatcacaggggattttacaccttctgtgatattgggaataatagcatcctctcctccttttatattaggaacaatatcccagggggtgtgtacaccctttgcgatattgggactactatcatcctcttccccactggatattaggaacaatatcaccggggggtgtacatgtcctgcaattttggaagtagtatcatcctctcttgccttttatattacaaacattgttacaaagggatgtacatcctctgcgatattgaaagtaatatcatcgtctcccccattggatattatgaacaatattacaaggaggagtacacacagggtgttaattatattgggagtaatattatcctctccccccttaatattacaaacaatatcacaggagggtgtacaccccccatgatcttgggattaatataatcctctccctccttggatatgacaaacgatatcacaaagtgtgtgtacaccccatgcgatatgagaggtagcataatccaagagaggattataatatctcttggatatcaggaaccatatcacaggggaatatacaccccgtgtgatatggggagtagtagtatcctctttctccctgaatattacaaacaatataacagggggatgtacactctccgcgatatggaaagtaatatcatcctctcctacattggatattatgaaccatatcacaggggggtgtacacccactgcgatatggggagtagtatcctcctctccacctttggatattatgaacaatatcacagaagggtgtacacttcctgagatattcggagtaatatcatcctcttttcacctggatattatgaacactatcacagcggggtgtacaccctctgtgacatggggaataatataattttctcctcccctggatattaccaaaagtatcacaggggggtgtacatcccctgtgatatgaggagtagtatcatcttctcctcccctgaatattaggaacaatgtcacagaggggtatacaccccctgcgatatgaggagtaatatcatcctttccacccttggatattatgaacaatatcacagggggtgtacacacaggttgtttactatattgggagtaatatcatcatccccctctatattataaagaatatcacagggggttgtacaccacctgcaatattgggagtaatatcatcccctccccctctggatattatgaacaatatcactggggactgtatccccccaagatattgaagataatatcatcctcttccctttggatattacaaaccacagagaggtgtacaccccctgcgatatggggagtaatattaacctctccttccctggatattacaaaccatatcacatgggggagtacacaccccgtgatatggagagtaatgtcaccctctctcttcctgaatattatgaaccatataaaaacccctgcgatatggggagtaatattaccttctcctcagcttaatattaggaaccatatcacaaaagggtatacactccccgcgatatggggagtaatatcacccagtataccccctggatattacaaaccatatcacatcgtggtgtacgcctcccatgatatggaaagtaatatcaccttcccccttcatagatattacaaaccaggccaggtgcagtggctcacgcctgtaatcccagcactttgggaggccgaggcaggtggatcatctgaggtcaggagttctagaccagcctggccaacatggtgaaaccccttctctactaaaaatacaaaaagtagccgggcgtggtggtgtgcgcctgtaatcccaacttcttgggggaccaaggcaggagaatcgcttgaacccgggaggctgaggttgcagtgagccgagatccggccatcatactccagcctgggggacaagagcgagacttcgtctcaaaaaaaaaaatgtagatattacaaaccatatcacattggggtgtatgcctcccgcgatatggggagtaatatcaccctctcctccctgggatattatgaaccatatcacataagtgtgtatgccccactcgatattgagagtaatgtaaccctctccccaactcagtgtaacaaaccatacaacagggggttgtacacccccagcaatatggagattaatatcaccctctcttcttctggatattatgaatcatatcacaggcgatgtacatgccccgagatacagggagtaataccaccttattccaccctggatattatgaaccatatcacagaggggtgtacaccccccacgatatgggagtaatatcaccctctccccttttggatattacgaactgtatttcacgggagtgtacacccttggcgatatggaaagcaatatcacctctcttaacctgaatattatgaaccatatcacaggtgggtgcacacccaccacgatgtggggagtaatgtcaccctctccttctctggatattactaaccgtataacacctccttcgatattgggagcaatattaccctctcccctcctggatattacgaaccatattcaaagggtggtgtacattccctggaatatggggagtaatatcaccctcttttcttctggatattatgaaccatatcacaggggagtgtacgccatccgagatacagggagtaatattactctctcccccgctgaatattacaaaccatatcacagggtggtgtgtgttccccgcgatatgaggagtaatatcaccctcttttcttcgggatattatgaaccatatcacagaggggtgtacgcccccgcaatatgggaagtaatatcaccctctccccgtctggatattacgaatcatatcacagaaaagtgtacgaccccacgatatggagagtaatatctccctctccgcccccgggatatcacaaaccatatcacaggggtgtatatgccccccgcgacatggagagtaatatctccctctcccctccgggatattatgaaccatatcatagtggggtgtatgccccacgtgatatggggagtaatatcaccctctccaccccaagatattatgaaccatttaacggggaggggtgtatgccaccgcgatatggggagtaatatcattttcttcctcctgggatgttacaaaccatatcacgtgggggtgtaccctgatatgtaacgtgatatggggagtaatagtaccctctccccccggggatactgtaaaccatttcccagggaagtgtacaccccccggtgatatagggagtaatatcaccctctccaccccgggatattgtgaaccatatcactgggagggtgtagcccccgcgacagggaaagtaatatcattgtctcctccttggggtatttcgaacatgtcacgagggtgtgtaacccctcactcggtatgtggagtaatatcaccctctccctccctgtatattatgagccatatcacacccaggtgtaggcccccggtgatatggggagaaatatcaccctctcagcccccgggatattacgaaccatgtcacaggggagtgtatgttccctgcaatatgaaaagtaatattgcactcttttccctgaagtattactaaccttgccacagaagggcgtatgctcttcgctgtatggggagtaatattaccctctaccccctcccccaccgggatatttcgaaccatgtcacaaaggagtatatggccctcgcgatatggggagtaatatcacactctccccccaaggatattatgaaccatatcacaggggggagtactccttcgcgatatggagagtaatatcaccctatccaccctgggatattacaaaccatatcaccaggggatgtaaacttcccgtgatgtggggagtaatatcaactccttcccttaagatattttgaaccgaggcggaagtaagggtgagaggaggctgcaacgccgatcggaggaggcaggaaccggagctctagcagtagctgggtgggcaccatggctgggatcaccaccatcgaggcggtgaagcgcaagatccaggttctgcagcagcaggcagatgatgcagaggagcgagctgagcgcctccagcgagaagttgagggagaaaggtgggcccgggaacaggctgaggctgaggtggcctccttgaacgtgggatccagctggttgaagaggagctggaccgtgctcaggagcacctggctactgccctgcaaaagctggaagaagcggaaaaagctgctgatgagagtgagagaggtaagaaggttattgaaaaccgggccttaaaagatgaagaaaagatggaactccaggaaatccaactcagagaagctaagcacattgcagaagaggcagataggaagtatgaagaggtggctcgtaagttggtgatcattgaaggagacttggaacgcacagaggaacgagctgagctggcagaatccctttgccgagagatggatgagcagattagactgatggaccagaacctgaagtgtctgagtgctgctgaagaaaagtactctcaaaaagaagacaaatatgaggaagagatcaagattcttactgataaaataaaggaggcggagacccatgctgagtttgctgagagatcggtagccaagctggaaaagacaattgatgacttggaagataaactgaaatgcaccaaaggggagcacctctgtacacaaaggatgctggaccagactctgcttgacctgaatgagatgtagaacgcctcagtctcaccctgctgctgctcctccctctgaaccagactccgcctgaggccagcctgcccgaagctgacctttaattgagggctgatctttaactggaaggctgctttctcctttcgccgccccctccttccgccgcccgctccttccctgtgtctttttcaccaaactgtccgcctcttcccggagattccagctgggctagaggctgagcacctttggaaacaacatttaagggaatgtgagcacaatgcataatgtctttaaaaagtatgttgtgatgtacacattttgtaattacctcttttgttgttttgtagcaaccttttgtaaaacattccatataataccacagccctgaagcagcgatcgaatccctttctcacttttggaaggtgacttttcaccttaatgcatattcctctctccatggaggagaggaaaaggtataggcctgccttgctgagagccaaacagagcccagggagactccactatgggaagcctcattgctctgtacaaagtactagctaagccagaaaggtggttccaggaggagttagccaaacaacaacaacaaaaaatgtgctgttcaagttttcagctttaagatacctttggataatgttatttctattttttatttttttcattagaagtgaccaaattaagatggcaagacctctgagaccaaaattttgttccatctctaccccctcccaactgcttacagaatggatcatgttccccttatgttgaggtgagcacttaattgcttttcttgcctccttgaaagaaagaaagaaagaaagaagattgtgtttttgccactgatttagccatgtgaaactcatctcattacccttttctgagtttgaagctgctgtctctacaagtgccatctcattgtgctttgtatcagtcagtgctggagaaatcttgaatagcttatgtacaaaactttttaaattttatattattttgaaactttgcttctttgggtttgtggcaccctggccaccccatctggctgtgacagcccctgcagtccgtgggctggcagtttgttgatcttttaaagtttctttccctaccctgtccccattttctggtaaggtttctaggaggtctgttaggtgtacatcctacagcttattggcttaatatgtactctcctttgatgtggtctacttggggccgattgggagaaagagaaatcaatagtgcaactgttttgttaatgaatattgacaagtgtctttttgaaataaagaaccagtccttcaaaaaaaaaagacattttgaaccatatcacaggggggtgtatgtccctgcaatatggggagtaatatcactctctcccctctgggatattacaaaccatatcacaggagggtgtacgtccccacaatatggggagtaatattaccctctcctccctggatattatgaaccaaaccacagggggcttatgccacccgcgatatggagcataatatcttcctctactccccggaatattatgaactgtatcacaggggagtgtatgcccttcacaatacgaagagtaatattaccctctcccccatgggatattacgaaccatgtcacaccccttgcgatatgggaagtaatatccctgtctttccttccggatattctgaaccatatcacagggggatatacaccccctgggatatggggagtaatatcgttctccttgggccatgcgtggtggctcacatctgtaatctcagcacttttggaggccgaggcggatggatcacagggtcaggagttcgagatcagcctggccaatatggtgaaaccccgtctctaataaaaatacaaaaattagccagacgttgtggggtgcgcctgtagtcccagctattcaggaggctgggagaggagaattgcttgagtccaggaggcgggggttgcagtgagccaagatcgtgccactgcactccaacctgggtgacacagtgagactcaaaaaaaaaaaatcattctcatttccccccctggatattacaaactgtttcacaggtaaatgtagaccacctgcgatatggtgagtaatatcaccctcctctccttccctggatattacagaccatatcgccgggggtgtactccccctcccgtgtacacccccggcgatatggggagtaatatcactctcctgtttccttttggatattatgaacttgatcaaagagggatgtactcccaccgagatatggggagtaatatcaccctcctcatccccctggatattccaaaccatatcacaggggggtgggcaccacccgcgatgtggggagtaatatcaccctctcttctattacaaacaatattacaggggtatgtacacttcccgcgatatggggagtaatattaccctcacccaccctggatattatgaaccatatcacaggagagtgtacatcccccaagatgtggagagtgatagcagcctccttccccaggatattatgaaccataacacacccccggcaatatgaggagtaatatcaccctctcccgacctggatattacgaaccatgtcacaggagggtgtacatgccccgagatatggggagtaacattaccctctcctcccctggatattacaaaccatgttacaacccccgtgatatggtgagtaatatcacccactatatcccctagatattacaaaccatatcacaggaaggtgtacgccccccacaatatggggagtaatatcaatctctccccttctggatattacgaaccatatcacagggaagggtatacctcccatgatatgggaagtaatatcaccctctccaacttggatattatgaaccatatcataaaggggtgtctgcacccagcaatatggaaagtaatatcaccttttcctcccctagatattacaaaccatatcacagggggggtgtatgccctctgcaatacggggattaatatcaccctcttcttttctggttattatgaaccatatcacaggggttgtatgtccccccgcaatatggggaataatatcaccctctcccccctggatattaggaaccatatcacagggaagtgtactcccttcatgatatggaaacgactcctcctctgccccctggatattactaattataccacagaagagtgcacgccccctgattatcacacctcccaagatatgtggagtaatatcatcgtcctctacccttctggatattatgaaccatatcacagggggttgtacacccttcgcgatatgaggagcaatatcaccctcctctctcccctggatattatgaactatatcacaggggagtttacaacacccgcgatatggggagtaaatatcactctcctctcccccgcctggatattatgaaccacgtcacagggcgtgtgtacacttcacttcaactttttcccttaagttgtacacatcaacttcttcctttgagatactatgaaccagatcacgggggtgtatgctccccgcgatatggggagtaatatcaccctcgccccccaaagatattacaaaccatatcacagggggctgtacgtctccacaatatggggagtaatattaccctctcccccctggatattataagccaaaccatagggggttgtaggccacccgcgatatagggcatagtatcttcctccactctccggaatattatgagctatatcacaggggggtgtatgcccttcgcgatatggggagtaatatcaccttctcccctcgggatataaagaaccacatcacaaaaaagtggacgccttccacgatatggggagtgatatcaccctcatctgcccccctggatattaccaaccacatcacaaaggggtgtacacccccccgatattgggagtaatgtcaccctcctttttcactctggatattctgaaccatatcacagggagttgtacaccgcctgcgatatgaggagtaatatagtaatagcatcttctccacccctggatattaggaacaaaatcacaaggaaagtgtacattccctgcgatattgaaagtaaaatcatccttcccccatattgcatattagaaacaatatcacagctcgggtgtataccccctgcgatattgggagcaatatcatcctctgcctcctggatattagaaaaaatatcacaagggggtgtatacgactcctgagatattgggagtaacatcattctctcccaccctgaatattaggaacaatatcacaggggggtgtacaccctctccaatattgagagtaatattatcctgccaccccaccccccagatattaggaacaaaattacagggaaaatgtacgccctgtgatattggaaataatactattttttatttctctggatattaggaacaatatcacggggggtgtacaccctctgcgatattgggaataatattatcctctgcccccctggatattggaacaatatcaaaggggggtgtacacccctgtcaatattaagggtaatatcatactctccctttcctgatattaggaaaaatatcacaaaggaggtgttcacccctgcaatattgggagtaacatgattttctcctctactggatatgagaaacaatatcacaggggtagtgtacacgctcagtattgaaagtaatatcatcttctcactccctggatattagcaacaatataacagggaaggtgaacacttcttgcgatattgtgagtaatattatcttctactccgccggatgtaggtgtacatcccctgcgatattgggagtaatatgattctctccccctctgggtattaggaacaatatcacggagtggggggagacaccacccgcgatattgggagtaatattatcctgtcattctcctggatattaggaacaatatcataagggagtgtacacctcctgtgatattgatagtaatatcaccctcattttccctagatattagaaacaatatcacaggttggggtgtacaccccctgtgatcctgagtgtaatatcctctccctccctggatattggaagcaatatcacagaaagggtgtacagtctttgcgatattgggagtaatatcatcctctccctcatggatattaagaacaatatcaaagaaggcctgtacacaccctgtgacattgggagtaatatcatcttctcttcctctggatattagaaacaatatcacacggagggtgtatagccctgggatatttggagtaatattatcctctcccaccctggatattaaaaacaatatcacagtgggggtgtaatccccctgcgatattgggagtaatatcatcctctccccccagatattagaaactatataaaaagaagggtgtacaccccatgcgatattggaaggaatattattttctccaaccttgaatattaaaaacaatatcacagggggctctacaccccctgctgcaatacagtgagtaatattaccctccttcgtcctgaacattaggaagaatatcacaaggggagtttacatctcctgtgatgttgggagtaataccatcctctcctccactgcatattagaaacaatatctcagggaaggtgtacacccctgcgatattgggagtaatataatcatttacccctctggatattaggaacaatatcacaggacaggtatacatttcttgtaatattaggagtaatatcatcctctttccttctggatattaggaaaaatatcacagggggagtgtatgtccccttcgattttaggagtaatattatcttctccacccctggatattagaagaaacaatatcacatagggttgtacagcccctgcgatattaggagtaatatcatctcctttccccctggatattaggaacaatatcaaagggaggttgtacaccttctacaatatttaaagtaatatcatctcctccgctggatactaggaacaatatcacaggaggtgtgcacaccccctgcgatattgagagtaatataattttctcccatccttgatattagaaacaatatcacggggagatgtacacccattgtgatatgtgatattaggagtaatatcattttctcccttcctggatattaggaaaaatatcatagtgggagtgtaagttccctgcgattttaagagtaatagcatcccctccccccctggatattaggaagaatatcacagaagcgatgtacaccccctgtgatattgggattaatatcatcctctctcttcctggatattaggatcaatatcacagggaagtgtacacaccctgcgatatttggagttatattattcttttcctttttgaatatgagaaacaatatcacagggccgttggacaccccctacaatattgcgagtaataccatcctctcaccgctggatattagaaacaacatcacaaggggctgtacaccttctgtgatattgacagtaatatcatcctcttctttcttagatataacaaacaatatcacaggaggagtgtacacccactgttgatattgggagtaatattatcacagggcgtgcgtgcaacccctgcaatattgggagcaatgtcatcctctcttactctggatattaggaacaatatcacggggggtgtatacagcctgcaatattgggagtaacatcattctttgcctccctggatattaagaatgatatcatggggggcctgtacaccccctgcgatattgggagtaatatcagcctttcaccctttggatataaaaaacaatatcacggggatggtgtacaccctctgctgtatttggagtagtagcattcttttctccatgaatattaggaacaatatctcaggaggagtgtacgtcccctgtgattttgggagtaatattatcctctccccctggatattagcaacaatatcacaggggtggtgtacaccccctgcgatactgggagtaatatcattctctcctttcctggatgttaggaataatatcacaaagaggatgtacaccttctgtgatattgggggtaatatccttacccacataaatattaggaaatatatcacaggggggtgtacatatcctgcgatattggaagtagttcattctttcccgcctggatattatgaacagtatcccaggggtgtgtacactctgtgatattgggggtaatgtcatcttctacccccctggatattataaacaatatcacaggggatgtacacacaggatgtttacgttattttgagtaatatcatcctctccacccctggatattacaaacaatatcacagggaggtgcacatcccctgaaatattggcaattatatcatccttttctcccctggatattacgaacaatatcacaggggggtgtacaccccctgtgatactcggagtgatatcatcctctccttttctagatatttcaaagaatatcacagggaccgtacaccacctgcaatattgggagtaatatcatcctctccttttctggatatgatgaacaataaatatcactagtgggtggacacccccggtgatattgggagtaatgttatcctgtcttcccctggatattatgaacaatatggcaaaggggtgtacactccctgggatattgggagtaatagcatcctctttcattccggatattgggaacaatatcacaggagagtgtacacccccttcgatattggaagtaatattatcatatttttttcctgtattttaagaacaatatcatcttctccattctgaatattaccaacaatattacagggggatgaacgtcccctgagatattaagactaatataattttctctccccctagatattacgaacaatatcacagggggttgtactccccctgctatattggaaataatagcattctcttttcttcttggtattacaaacaagatcacaggggggtgtacactccccacgattttgggagctatatcatcctttccccctctggatattcggaacaatatcacagggagtgtgcaccccctgcgatattgggagtaacattatcctctccccagagcgcctctgcccggcctctgaaccgtctgggaagtgaggagcgcctctgcccggcagccccaccatctgggaaatgaggagagtctctgcccggagtccaagtgtctgggaagtgaggagcgcctctgcccagccgccccactgtcagggaagtgaggagtgcctcagctcggcggccacaccatctgggaagtgaggagcacctctgcatggccacaccaccgtctgggaagtgaggatcgcctctagcctgccgccccaccatgtgggaagtgaggagcgcctctgctgggccgccctaccctctgagaagtgaggatcgcctctgcccggctgccccaccatctgggaagtgtggagcgcctctggcttgccgctgctccgtttgggaagtgaggagtgcctctgccaggcctgcaaaccgtctgggcagtgaggagcacctctgcccggcagccccctgttctgggaagtgaggagcacctctgcccggctcctgcaacatctcggaagtgaggagcacctctgcccggctgcctcaccgtctggggagtgaggagcgcctctgcccggccactgtgcaaccctccaattgtgaagtggcagccttctgtttgatctttctgcccttctcaagtttgcatttttgacattaaagtttacttttaaaataaaaaaattatcttctccccttctggatattacaaacaatatcacaagaaggttacaccccttgagctattgtaaggaatagcatcctctccctaccttgatattacaaacaatatcatatggggctacacaccccctgtgatattggaagtaatatcatcctctccccttctggattttatggacaatatcacaaaagggtgtgcaccttctacgatattgtgagtaatatcatcctctacccccctggatattatgaaccatatcatatgggggtgtacacttcccaccatatggggagtaatagcaacctctccccttccggatattacgaaccatactacagggcggtgtacaccctccacgatatggggagtaatagcattctctcccgtcgtggatattacaaactataccacaaagaggtgtacactccctgtgatatggggataattacaccttctctccctccttgattttacgatccgtactacaagggggtgtacactccccgcaatatggggagtaatagcacctactcccccgctggatattaggaaccaaaggggggtgtacacccctctctataaggggagtcacagtgtagcaggaggagccgcggacaaaatcccacagacaccgaggtagtgaaggaagtggcttttaatcagctggaagcatcagcagactagagtatcaaaatccaagcttgttgagtgcacaatttctgtcctttttaagggctcacaacactaaggtttttacatgaaagggccatgattgattgagcaatctagtgggtatgtgacaagggctgcatgcaccagtactcagagtgaaacagaacagaacaagaaatttcacaatgtccttccatacaatgtctggaatctatggataacatcagttgctaggtcatgggttgaattttaactttcaggctaaggtcaggaaggcccaggcctggtttcgggtctggttttggatctggtgcctggcgccgggctgcctgcctttggtttcgcttccttgtttcttcttaaaacaggtactgagtataaaataatacagaacaatatggggggggtcttttgctctcttctctcaatagcaccccttacctgggatattacaaaacataccatagaggggtgtacgcctcctgcaaaatggggaataatagcaccctctcttaccctggatatttcgaaccataccacagggaggtgcactccccccgcgatatggggagtaatagcaccctcaatcccctggatattgtgaaccgtaccacaggggagtgtacatttccagcgatatgaggggtaataacaccctcttcgttcccggagattacaaaacataccacacgggggtgtacacaccccgcgatatgggaagtaatagcatcctctttccccctggatattaggaaccgtaccgcagcagggtgtacatgcctcgcgatatggggaataatagcaccctttccctccctggatattatgaaccataccacaggggggtgtacaccccttgcaatatggaaagtaatagcaccctctttccttctggatattaggaaacataccaaagaggggtgtacaccccctgcgatattgaaagtaatattatcttgctcccttctggatactaggaacaatatcacaggggagtgtacatgccctgtgatgttttgagtaatatcatcctctcccctttgaatgttaggatcaatatcacagggaggtgtacacgttctgcgatattgggagtaatatcatcctctacttttctggatattaggaacagtatcacagaagatgtgaacactccctgctatatatccagtaatatcaacctctcccctcctggatatcaagaataatataaccggggggtgtaccccacctctgatattggaagtaatatcatcctctctccctctatatattatgaacaatatctcagagagggtgtatgccccctgcgatattgggcgtaatatcatactctcttcccctggatattaaaaacaatatcacagggggaataggcaccacctgagatattgggagtaatatcatcctctcccttaaaggatattaggaacaatacataggggtggtgtacacctcctgtgatattataagttatatcatcctctcttcccccaaaatattaggaacaatattacaggggcgttgtacaccttctgggatatggagagcaatgtcatcctcttttccattggatattaggaacaatataaaaggggggtggacacaccctgcgatattggcagtaatatcatcttttccctcctggatattaagaaaaatataacaagagaggtgtacacttcctgcgacattgagagtgatatcgtcctcccccgcatggatattaggaacaatatcacaggttggtgcacaccccctgcgatattgggactaatatcatcctctccccgcccgaatatttggaacaatatcacaggggggtgtacacccccctgcaatattgagagtaatattctctcttcctgtggatattaggaacgatatcacaggagaggtgtacacaccctgagatattgggagtaatattttcatctttccttttgaatattaggaacaatagcagggtggggtacacaccctgtgatattggcagtaatgtcatccttcttccccctgggtattagaaacaatataacaggggaagtgtacaccctctccgatattgggagtaatatcatcctcttccctgctggatattaggaacaacatgacacggtgggtgtacacttcctggaaaatgggattaatatcatcctctttcttcctggatattaggaacactaccaaaggggaagtgtaaccccctgcaatattggtagtaatatcatcctctttttccctgattattatgaagaatatcacagcgggggtgtacaatttctgcgatattgagaataatagcatcctctcctccctccccaaatactagaaacaatatcccaggataagtgtacaccctctgcgatattgggcataatatcacactcttttcccctggatattagaaacaatatcataggtggggtgtacaccccctgggagtaatatcatcctcaccacttctggatattaggaacaatatcacaggaggtgtgtacaccccttgctgcaatgggagtaatatcatgtaccttccccctggatattgaaaactataccacaggaaaggtgtacaaaccctgtgatattgaaagtaatattatcttctttccccctgagtattaggaacaataccacatggggtgtgtacaccccctgccatattgggagtaatattattttcccctcgcctggatataaggaacaatatcacaggaggggtgtacacccccagcgatattgaaagcaatatcatctcctcccctcttgatattaaaaacaatatcaccggaggagttcacacccctgtgatatggagactaatatcattttctccccaccgaagtattaagaacaatatcatgggggggtgtgtacaccttttgtgatattgggagtaatatcatccttttccaacctgtatattaaaaaccatatcacagggggtgtgtacaccccctgtaatattcacaataatatcatcgttttcttccctggctattaggaacaatatcacaatggtggtgtacaccccctgtgatattgggagtaacatcatcctcttcccttttggatactgtgaacaatcccacaggggagaggtacaccccctgcgatattgggagtaatatcctctcccgtcatggatattaggaacaatatcacaggagcggtgtacaccccctgcgatattgggagtaatatcattttctcccaacctaactagcacaatatcacagggggtgttcgccccctgccatattgagagtaatgtcatcctctcccctcctggatatgaaaaacaatatcacagtggggccgtgcaccccctgcgatattgggagtaatatcatcctctctaccccctggatatgaggaacaatattacaaaggggtgtacaccccctggaatattcacagcaatatcattgtttcccttcctggatattaggaacagtatcacaaggggggtgtagacctccagcgatattgggagtaatatcatgctctctccttctttatattagaaacaatatcacggggaggggtgtacaccacctgcgatatcatcctctttacccctggatattaggaacaatatcacttgtggggtgtacttctcctgtgatatcgggcataataatatcctctcccccctgaatattaagaacaatataacagggggacagcacaacccctgtgatattgaaagtaatatcatcctctgcttccctgaatattaggaacattatcacggggggggggggtgtacactccctgctatattgggagtaatataatcctctccctccctgaatattaggaacaatatcacaaggggggtgtacaaccccttctatatgagaagtaatatcatcctcttccttcctttatatatatttttttccattgaaagttgtttatttctctgatgtaagtgagctaagtcactacagcattaaaatctcttttctagaacaacgtaaagaacaatgtatacacatcttaaatttggtaggtcacaaaagttagaatgcaatcatcttttgaggcaacaagaaaataaataaataaaaattaaacactttaacccaaaatttggtattgacaaatcagtagtgtcaacttcacatatgaaggacaatacagtctggttatttaaagatgctcaatatgtcatggtatttgggctaaagatacttagaatattgcgtttcctttttgattaaaggaatacaatgcaatcaccatcaagctgctatcataactcatttttagctgtggtaaagtgaccatttggtccatggcacaagttacatatatcacacttctgtcaaactgaaaccttgtaagatttcatgtttataagctacaatacaccctgaccaagctgtcagtcccctcacggttttttagaaaaatatctacatttgtccttatggatgtcaaaatgttacaccatcatttgttaaaaaaaaaaaaaaaagatgcacattcatactgtgaagttattaggaaaatactcttgcaaacaaactatataaagataaaacacgcttcaaaagtatgtggtttgttttcttgtttgtctgttttacaatattctataaagtgcagagtcctaagggaaaaaactactccctataacaatagttcaattacagcagcttttgcatagcaatacttagagaaagttggacactacagtttcttcaggaagagaaggatggaagagtatcttctgattcagattgttttttggccataagtctgctttcttcaggaatggttgctgatgccaaatctccgttaagtgtattttatgaacagtgaacaggtctatctgggtcttcaagaggaatatcactacaagaatctgtatctgagtaggttcttcggcgtcgctgggagagtcggtgaagtgcagatactggttcttttatacagtggctactcctccctggtgcaagaaccagggtggctgacagaacgcttcctcatttgaacaggagaaggtgacacaggagaaactaagggatccggatggtgccgttgaaacatctcaggtttaaacctggcattggctatcttcacacattcctcaagcgttgtgatgaacgtgttacacgtggcactaagcagagaagaggcttcattgatgttctctgcactaggagatgaatgattctcatcgtggtgaacaaattcctgtatcgtatgaacttgctgcattaagaggtcacagtagaggcgaagttcagacattttggttttcagcgattcactggtttcacttctttctttttcgtttttagtccttgtatcagtcaaacatgctttggagctccccagagcgaccagccacctctgtctttcagctgcgttcactgccttcatgtagaaatgctgctctccaggaatgattaattccattcttgtgttgtctgctgaatgaacagaatttatgtatccaatcaagggtggtcccctccaaagctgtcacctttaatttcacaaactgccatctttatgcttcctttgctccctttgcaaacatcatcttgtgaatcataataggataagattccattatctaaaacaaaccaacgaggctgccaacctgtgagatagttggtccacttgtacaaaaccccctccatgcttcagagccccacaccgctcatcctcccggcccggcgccggccgcggtgatggggtaggcgcggggcctggggcagcctttcccggcccgcccgggccccctccgccggcacgaagccgctttctgcctgcgcgcgccgcagggacgtggcggcccttagaggccgggacagcgggcgcagcgtggagcttgggggccgcgaggcgcgggctcagacatccccgggtaagcctcggcggcggcggccgcgacaacggcaaaaatgcgactgcgaccgcgaccggtctcgtgctcgcgcttccgcggcccggctgctccctccggcgccccggcgctgcctcttcctcgcctgccttccttccccctgggctccccgtttgtttttcgaccttcctttatattaggaacaatatcacaagtgggggtgtacaccccctgcaatattaggagtaatattatcctctctttttctagatattagaacaatatcacaggggaagtatacattccctgtgatattgcgagtaatattctctctctcttctaaatatttgcaacaatatcacagaaaaggtgtacaacccctacgatattgggagtattactattctcttccccctggatattagaaacaatattacaggttaaatgtacacttcctgcgatactgggaggaatatcattctcttttgctctggatattaggaacaatgtcacaagggggatgtacactctctgagatattgaaagtaatttaattatctccccccgcccccggctattaggaacaatatcacagggggcggtgtacaccctctgcaatatttagagaaatataattctctttcccctcgatttcaagaacaatatcacaggggatgcgtgtacaccccctgcgatattgggagtaatatcatcctctgtccctctaaatattaggaacaatatcatgggtggtgtacacaccctgcgatattggcaataatgtcatcctctccttttctgcatactaggaacaacataatgggggagtgtacacctcctgcaatattaggagtaatatcatcttcttccgccatggttattaggagcaatatcacagaaggttttataacccctgtgatattgggagtaatatcatccttccccccacgtatatcccagccttgatattaggaacaatattacaggggaggtgtataccccctgctataaggggagtaacataatcccctttcttcctggatattaggagtaatatcacccgttttccacctgaatattagaaacaatatcatagggaaggtgtatatcccctgagacattgggagtaatattattttctcctcgcttggatattagaaacaatatcacagggggtgtgttcaccccctgcgatattgggagtaatattatcttctctcctgcggatattaggacaatatcacaaagggggtgtacactccctggaatattcacactaacatcatcgtttacttccctgaatattagggacaatatcacaaggggagactacaccccctgcgatattgggtgtaatatcatcgtctcccccatggatattaagaacaatattatcggaagtgtgtacactctctgcgatatttggactaatatcattttctcccaacctaaatattaacaacaatatcacgggggtgtacagcccctgcaatattgaaagtaatattatcctcttccccctggatattagtaacaatatcacgggggaggtgtacaccccttgcgatactggaagtgatatcatcctctcccagtcttgatattagaaacaatgttacagggaggcgtataccgtctgctataatgggagcaatatcatcctctttcttcctggatattaggagaaatatcacaggggttgtgtacaacccctgcgatattgaaagtaacatcatcttctttccctctgaatattaggaacgatatgatggggaaggtgtacaccccctgcggtattgagagtgatatcattttctcctcgcttggatattagaaacaacatcacaggaggggtgtacacccactgcgatattgggagtaatataatcctctcccacccctggatattaggaacaatattagaatattaggaaggtgtacactccctggaatatttacagtaatatcatcctttccttcccaggatattaggaaaaatatcattttctcccaacctaaatattaataacaacatcatagagggtgtacagcccctgcaatattgaaagtaatatcatcctctacctccctggatattaggaacaatatcacagggcatgtacacctcctgcgatattgggagtaatggcatcctttcccatccttgatattagaaaaatatcagagagggggtacacactccctgcaaaaattgaaagtaatatcctctccaccgctggatattaggagcaatataacgggggagggcctgtatacaccctgcaatattgggagcaatattattttctccttcactggattttaggaacaatatcacagtgtgggtgtaaaccccctgcgatattgggagtaacaacatcctctttccccatggatattaaatacaatatcacaggaggggtgtacactctcttcgatattgggagtaatattcttctttcttttccttgatgtaaggaacaatatcagaggggggtgtacaccacctgcaatattgggagtaatatcatcctttccctttctggatattaggaacaatatcacaagaaatgtgtacactggctgcaatactggaagtaatataatcctctcccttcctggatattagaaacaatatcccaaaagggatgtacactcccagcgatattgaaagtcatataatcgtctgcttccctggatattatgaagaacatcacagggtgggtgtccactttctgcgatattgagagtaatatcttcctctctcctcctgaatattacgaacaatattgcatggaggatgtacctcccttgcgatattgggagtaatatcctcctctctcccccttgatattaggaacaatatcatgggggagtagtgtacacatcctgcgatattgggactaatgtcatttccccccactcggatcataggaacaatgtaacagggaaagtgcacaccccctgtgatattgggggtaatatcatcctctcccgccctggatattaggaacaatatcacagggcgttgtactccttctgcgattttaggaacaatatcatactgtccccttttgtatattaggaacaaatcacagggttgtacgccccctgcgatattgagagtaatattgtcccattctcccctgtatattaagaaccatgtcacagagtgtgtgtacaccccctgccatattctgagtaatatcatcctctccccctcctgatattaggaacaatatcataggcatgggtacacaccctgcaatattaagagtaatatcatcctctccctccctgggtgttatatcatcctctcttccactggatattaggaacaatgtcacagagagtgtgtacacccgtgtgatattgaaagtaatatcatcgtctccctccctggatattaggaatccaaagtcttttccacagcattctaatccacatggatcattctcaaaaatagatcacatggacacagggaggggaacatcacacaccaggtcctgtcagagggtggaggttaggggagggatagcattatgagaagtacctaatgtagatgacaggttaatgggagcagcaaaccaccatggcacgtgtatacctatgtaacaaaactgcacggtctacacatgtaccccacaacttaaagtttaataaaaaaaaaaagtagaccatatgttaggtcacaaaacacatcttaaaatgtgaaaaaaaattgaaataatatcaagcatcttcttgaaccatagtggaataaaactagaaattgatcacaagaggtattttggaaactatgtaagtacatggaagtttaaaaatatgctcccaaatgatcagttgctcaatgaagaaattaagaaaaatattgaaaaatttctgacacaattgataatggaaacacaacataacaaagcctatgagatacagcaaaagcagaactaagaaggaagtttatagctgtaagtggttacatcttatgacataatgaggacatgcttacgtcttatggtgtagagaggaagaacttcaaataaacaatctaacaatgcacattaaagagctagagaggcaataagcataccaaagctaaaatgagaagaagatagaataaagcttagagtttaaataaataaaatggaaataaaaaatacagaaatcaatgaaagaagaagttgatttcttgaaaatttaaacaaaattaggctgggcgcagtggctcatgcctgtaatcccagcactttgggaggctgaggcaggtggattatgaagtcaagagatcgagaccatcctggccaacatggtgaaaacccgtgtctactaaaaatacaaaaattagctgggagtggtggcacttgcctgtagtcccagctatttgggagggtgaggcaggagaattgcttgaacctgggagacggaggttccagtgagccaagatcacaccactacactccagcctggtggcagagcgagacaaacaaaagaaaaagttcaacaaaattaagaaattattaggcagcctaagtaagaaaaaaaggggcaggatccaaataaatacaatcaaaaatgaagaaggagacattataattggtactgcaggaactcaaatgacgattagaggctacaatgggcaattatgtgccaataaatttgaaaatctaaaagaaatggacaaattcctagatacacacagcctaccaagattaaataaggaacaaattcaaaacatgaatagaccaataacaagtaacgagattgaagccataataaacagccttccactaaagaaaagcccggggcccaatgacttcacttcggaattctaccaaatatttaaagaaccaacaccagtcttattcaaattattctaaaaaataaaaggggatggaacactactacccagataccaaaaccagacatagacacatcaaaacaaacaaacaaacaaacaacaaaacaaagaaaaaagaaaaaaaaagaaactgcaggccaatatctctgatgaatattgatgcaaaaatcctcaacaaaataccagcaaacggaattcaagaatgcattaaaaattcatttgtcatgatcaagtggaattcatgcccaggatgcaaggacagtgcaccatatggaaatcatcaacatgatacatcatatcaagagaatgaaggacaaaaagcatatgatcgtttcaactgaaactgaaaaacgtttgataaagttcaacatcacttcataacaaaaaccctgaaaaaactacatacacagggaacataccccaacataataaaagccataaatgacagatgcacagctaatatcatactgaatgaggaaaaatgaaagcctttcctctaagatctggacgataacaagaaataatgcagcgcttgaggacattttttattcttctctgtttctctcgctaaagcatttcctacacaatatttggtctctgaaccatggggcagaatggttattttgctttgttaattttatagacacttaaacttaacagggttcaccactccataccaaaatttggtgaaccccaaggaccaaatcacattattggaagtaacagtgaaacccaagcacacttcccacacactgaaaatgctgagtttgacctgagtcctagtatcccagccaagagggttcccaaaagaaatgaatcctctagggcttgccactaggagccttctgttgtctttctgagtgagggatagggtgcacaagaaagttttcttccaccttcttctttttttgtgtatgagaaagtgttggaaataattgcttcttcttcagtgctgcaaggaagaatcagcatttagaccaaaagttttctcagcaagacaactttaatttctttagaaagggtgttgctcatcagctgagagcaccccaaacaaagggagacaggaatatttatctgttaagcatgaggtcgctactgctgtgtgctatctccattggctggggttggacctcacagtctatgctacatccaactggctaagaacctaaaactgtcctcaataggtaaagatagtggagacaaagaaaaagaggaagttgcttacaagaatgcttataggagtaacagcatttcccaataaggaaaggatataaggtatgggctggaacatgcctgggcacattcacgcatgcctgagcttgctagaacaagcactgaggttagagtataaatatatataatatgcttcttccattactcttgcctcataaagcttaacaaagatttactaccatcaaataaagaagcttgaagaaagtgagtttcaaagaggatatattaattccaacatttatgatttaaagaagaaaactttgaagaggaatgtttttattttccacagacagattatcactctaatgcctaggctagagtgcagtggcatgatcttcgctcattacaaactctggctcccagattcaagtgattcttgtgcctcagcctcccaaggagttgggattacaggcatgtgccacaataactggctatttttgtatttttagtagagttggggtttctgcacattgcccagggtggtctcaagctgctggcctcaagtgatccacccaactggggctctcaaagtgctgggattacaggctgagcaactgtgcctggctgaaagtgtccattctaaagatagcaaaggcaatgattttgtatcacttcagaatccttccttgaatgttaggcagacttcctcacccactatccctgatttgatttgtgtatccttgctaatgggggttacagctattaattttatttttgtaattgccattgtttggctatttggtgacacatagttcttgttaactggtggttgtcaatttgaagaatccaagagcaggtggagatgcctcaggatgaaaatagaaagcctccagacctgggagaaagaagggtgtatacacctcccgaaaggtagatggggggcagtgtacttgcacaactcactctccagaatgggcttggcagtgtcccagtggaagactatggtagatgatcaagaaaacaaaaagtctgcggaaggagttgagggtcgcagagggaggagaatctattgcagaatacacagtgcagacagaatactcaagggcatggatgaagtgtccttacaatgagggctgagggtctgagaattggatatgaggccattcaggagaggatgggagtctgaatctgttttctgcttagaagtccctccaggacaccagcttgagacaaaggttggaggtataggcattgcaggatgagggtcagccttttccagtggccaggtctggcaaaggtaagatgagagcagcttgctgtcaatgtggctctggcttgggtattgtgagcattgtcagggaaggctacagagagtcagatgagacctgcaggagcccatggcctcctagagacaaggcatcaatttagctaggtgttatagtgtcaccactatgacctgggagttacagtgtcaccactagagacccaacagcaggatgtggaactgagaagtggttgattggttgttcatgggcaggaatatgtgggtgttttggtttgagtaaagagtgggcacaccttagagaatgaagcccccaaaacaccagaaaattggacagggtagggagcctaggtcctggatggctgggggcaagctccaggtggagtgtaactctgagggcatcagatattttctgactcagttgtcatatgggccatatggcacatatatggcacatagggaacatattgcacacttctcttgcagtagcctgctagtgggtggacaatatcctgtgcactgaacagaggcagcaagtgagcagaacaactcatcatgacggctttttgtccttgtctccatgcaagccaggtgttatttctgtggtttcggacgttggtattgatgcacggttttttaaaaggggaggctaaagtcccagagtttggtagactgcacctctccagatgagattttaagagcccccgattttcacacatggggagagtgattgccctcacaaactcttcctcctcattgtggtttctaggttttcactttgtcagacattttgagtttcgatcacaaacactccacgttcacatcacccatgcatgctgcccacccgtatccacaaggctgctgtgtctactctgctcctgttttccaaagcaccccttccatcaggaaatgtgccttccattcctagggatgtcatgattcccagctttcatatctcctcacagaggaggttcccaaattactctgggttctcagtccagaagttgagcctttaaaacccttttctgtcatatggtcagtccgttgcagggtgcagcccctcagcagccaagattccctgtggatagctcttcaatctgattgcctgggctttctccatcatgaaacctttcatctccttggtccttgtcacacaccctgaaccccaaaatagaaaagccacaacagaatgaagtagatgagaaacaatctccttgtttataattccgtttatttcctcacataccagccaagcttctcagtcaggcagacacaatagatggaatggcaagggaagtgaagagtggaggctgcatcccttcagccgccagctgatgttctgcttatttcgcataccggaactcccaggcgtcctcaaaccacaatcacagttgttggttccagaaacatcttctttggaaaaacatgtgacatcagtttcctcagagtcttccggacaatccagtcacacagaactgacaaaaccttgtcaggtgagaagataaggatcttcttcaatacagaatatgtcaacatctccttctgaatagttccgtttatttgctcacataccagccaagcttctcagtcagcaggcacaatagactgaataggaagggaagtgaagagtgaagtctggatccgtttagcctccagctgatgttctgcttatttcctgtactggaactctcagaagtcctcaaaccacaatcacagttgttggttccagaaacatcttctttggaaaaacatgtgacatcagtttcctcagagtctcccggacaatccagtcacgcagaactgacaaaaccttgtccagtaagaaggtaagaatcttcttcaatagagaatacgtcaacgtctccgtgaacgaagagatctgctggttccaaggacttgtcgtggatttctgtcctagatactttcttccgtaattcaagataaagaaaattacaatctctgctgtccattccatcgcttttcccttcagaatcataatcagagaatccttgcagaacgtcgtgagtgtgctctcagctgcaatcaccagaaggactcttcacactcggtgagtcctcctcattttatagaagccaaagcagtgacgtatgctcacccctcccgcccccaggagagaggttgctggccaatgagcttgagcttcgtcatccttccaagccccacccagttcctttgcttccctttcaccaactttgactgaaatgaataggttacaacctttagctttctgccccttggaaaacggaagcatttagacatccgtattaatatttggatctagagtgttcgtgttttagcacttccttttttgaaaggagaagcagacgtgttgtgtttttaggaacacttccaagaagtttctcctcctctatgatgaaaccaacacaagaaagccaaaagggcgtttaaccccttgaagcactgagagtttccctgctgatattcttagactgttctttttctaaaacgagaaagaggtaagttctctttttttttttacactgcccaaaactctctctgctcagtgctgggcactggaaaacaatggccctctctctggaaaccactatctgccatctcaagggcccactacaggtctgcccagcattttcatcccttcctcaagtctggtgcccaggaccctcctctgctctgacagccaggcagcagcactcaaactcccctcccctcttagccttcataccttcagctgcacttctgcctctgcagtgtcaggatgacctccccttcctcctgtccttcctcattcttaagacttcctaccccttctggattaatttatggaaaacctaaataatctctttcaaattttagcccactttttacatgtagattgttttataagatgaattttaacaaaccttttctaagttgttcaaccattttcttttgtctttttgttattttatttcctgaatttaaaatatttgaaaacctctaaacttgacaaaactaattttttcataaaagctatgttctcatgtccttttataaactttgacttaaaatatattttacttgttcagtcagatttgtgtgtgaaaatttttaagtagctttagatacaaatattaattataatggtaactcttaagtatgcatttttagtaaaccacttaggagacaaccaattttaattatgtccttgatgtagagcttaaagaaaaagatggagctgtagaaaacatcttagtcttgaaatatcttactcttcccagtataagggggggcatggccctatttcacaggtgcccaggccttagctagaaatggatggttccaagacatgtcaaaaaactgtttgaaaggttttagaagttgttaatgacatgaaaatatttagtaaaggcagtatttgatctgtctaatttggatccaatatctaaactctgaagacatatttattttattttgctaattttaaaagtggctttattttttaaaataatgtttatgtttctttcaatagtgtgtggaatatatgtggtttttggttatgtggataaaagttccttagtggtaatttctgagattttgaggcatctgtctcctgagcagtgtataatatacccaatatgtcatcatttattcctcatccccctcccaacctttccccgagtccccaagtccattatatcattcttatgcctttgcattctcatagcttaactctcatttaaaagtgaaaacattcaatatttgatttgccattcctcagttacttcacttagaataatggcttccagttccatccaacttgttgcaaaggacattattttgttcctttttattatcaagtattattccatggtgtaccacatttgctttatccactcgttcgttgatgggcacttaagttggtcccatatcactgcaattgcgaatcggctgctataaacatccatattcttgtgtcttttttatggaataacttcttttcctttgggtagatagccagtaatgggattgctggaatgaatggtctacttttagttctttaaggaatccccatactgtttaccatagtggtcggactagtttaaattcccactagcagtgtcaaagtgctcccttttgaccacatctatgccaacatctattgttttctgacttttaaattatgggcttctagcaagattaagatagcatctcattgtggttttgttgtgggatttaggaggatgagagagaggctttgggttaaaacaggagaatcttttattgagtgctctcaggcccagcagactcacgtccaaagacagggcctggaacaaagacagcacttgacttttatacacacttcacaaaagggggtgggccagcttgaagcaagcttacagtggtgtgaaagcagggatacagaggcaggaaaaagacagttaatcaaattgtaacaggttcataactcaggattgcacataactgttgctatgcaacccagatgtctattatctaggttttgctctaaagaggcttgcattggtttatcttcactatggtgcctagagagctgtagttcaggcctgctcaggcttctcatgacctttgccatacttcttagataaaacagaatacttgaagttactagttaaagagaacaagaatctataaactcataccataaaacaaaggaaaatttgtttttcttctccctacattgaaggagtgctggaagagtctccagaatacaataaataatattatcaagacttttcctgggtctgggctgtgcctgttgctgcctctgggacaagttagcttaatacaagaaagcttatttccctttctttttaattttatttttctttaatttcccacctcagttttactttgcatttccctgagaatttttaataagtaaaatacttagaaatatacttaaccaagtaggttaatgtaagtttcctacaaggaaaactacaaaatagtgctgaaagaaatcacagttgacacaaacaaatgggaacacattataagcttatgaataggtagaatcaatattgtgaaagtgaccatactctccaaagccatctacagagcagtagaattctcatcaaaatatcatcattctccttcccagaactagaaaaaagaatcctaaaatttatacaaaaccaaaaacgtgaccgcatatccaaagcaatactttgcaaaaagaacaaatctgaaggcaggctttaaattatactacaaggctacaatcaccaaaatagcatgatactggtataaaatatgcacatagagcaatagaacagaatagagaacccagaaataaagccaaatgcttacagacaactaatcttcaacaaagtacacaaaaacattaattggggaaaggatactttattcaataaatggtgcaggaagtataaaaataggcacatagagcaatggaacagaatagagaacccagaaataaagccaaatgcttacagacaactaatcttcaacaaagtatgcaaaaacactaattggggaaaggacactttattcaataaatggtgcaggaagtataaaaataggcacatagagcaatggaacagaatagagaaccgagaaacaaagcccggtactttcagtcacctgatctttaacaaagcatataaaaacttccatctaagacctgaaagtctaaaaatgctacaagatagcatccaaaaagcttttctagacattggcttaggccaagtagtcatgactaatgccccaaaagcaaacgcaaaaatataaaaatagaataagatcaataggacctaatgaaaccgaaaatcttctgcaaggcagaagaaatatcagcagggtaaacacacaacccacagtataggaaacagtagtcacaaactaggcatctgacaaaggactaatgtccagactccaaaggaactgaaagaaatcagcaagaagaaaaggtgccatttaccaccttcctgactcattggccagaaccaatgttagtggaattaacatatgccccaccccaagtgacttctaaagggctaactcaccacaagggagtcagagcagatcttggactgagacctacaggacacaggtactgctttttctcttttatttgttttaaattttatttatgtttttagatcaaatagttcagattgcattggtttttaatctgctgttgttggattaacatatgctttaagcgactcttaaataggtggctcaccaggagaaaggcatagcagaacctggactgagacctacgggagacaggtattgctttttctcttctaatcattttaaatttaatttaccatctttcatcaaatagctccgatcatatcattattttttcttttctgttttgttggtggttttattggtggagttttattttactattttagaaaagcagtcttttaaaaaagacttttaaaaagttttattactcttttttttaaaaaaattatgttttcccttgatgtgcttatttcctttataaagatcatcaccattaaattactaggagatactgcggctgattttgtcatgcgtgagataagaaattttttgccaaagcaattagtgatgagtgcaatggaaaaatccgtgatgatcttttaagatgattaactttctaatccagaaaatgctgctgtttgtactgaacaaaatagctttatttttatatgaccaggggtacataaaatgcttcaaaacaacacataatttggcaaaaatactatgtcttgccagccagaagaataagtgtggttttatttctatgtatatgtctagtaccatgcctgcactagagttgggaaattttaaaaacatcacctattgatacagaagagaagtgctgggaagggaagggcatggtccctttgaatgatacagaaaaggtgaaggaaagtgatgggtagaggaggccggggtccctggctagggctccaaacctgggcttgtgcccctggacctagatgaggacaggcatttttgttttcctgaccaaatgttgcatttcccaagatcaccctggcccaccatgccctatcctgtgcctaaaaaaaccctgggaccctagcaggcagacacacaggaggttggacgtcgagaggagcacatcagtgcaagaacacatgggtggctgccacttctctccctttcctgagagggaaaaactctcgacgctgagaggaatccaccaacaggcaccagcactctggcaggccaccgaccaatggattgacatagagtttggctggggcagccagaggagagcctgggccgctgaataacccgacttcaggggaaaactattctcccttttggctcccccatctgctgagagctacttccactcaataaaaccttgcactcattctccaagaccacgtgtgatttgatttttctggtacacctaggtaacaaccgcgggatacagaaagccctctgtctttgggttaaggaatgggtctaattgagctggttaccacaaagccacctatagatggcaaaactaaaagagcacatggtaccacatgtccactggggcttcagcagctgtaaacatctacccctagatgctgccatggggttgtagccccacaacttgccagtctgtatgcttccctagaggtttgagcagcggagtactaaagaagcaagccacacccccactccacctcctgtgagggggacaaggaaacttttcccatttcaactggtggctcgtctgggatctcggaaggtgagtgtgagtgaatgggaaactgttgggcctgcctttcttccaaaactctgccacttctctccctttcctgcaggtaaaagactctgttttcctttcatctcttttctctctcacacattatttgaaatggatcttatctcttcctttataatgttaagagttttgctacaggctgaggcaatgttactaagtaaaatgagcatttggctcagccgccaaaggtgcaaatcagaccaatttttcctagaggtgccatgtatgcctccaccttgacagccccaggcatgagcggcttccagggcacctctccttacccttttccctcccagctccagcacctaggcatgcctgcagcaggcaaaggccacacccaatagccatgaaggggcagggggagcaatgtcgcagaagtgtctccctccactgcctgggatgaggggggtgtgagaaaaccgatggtagccaggaccctacagagtgcttctcacccactgcatcaatggaacctttccttccatggccaaggaattcaacctggtctgaactgggggaaggatgggaaagttataaggattagaggggcccacttgcactaagcaaggggttcttcccccagcattccccactttttgcctctttaactgtttttctctttttttcttttctaagtgagaatccccaccgctctgtttctaatagggaagttaacagaggagtgacccctgctggctgataattgcaaattcagcagggcttatttgaggcactaaatggatataaacagcctctgaaatgctttttcagtcccaaactcaattccaagcttcaggctgaggccctagaaagagaaagcaggtctgaggaattcaaagccaggcaacaggcacaatgtaaatggacaggaccaattcctgctgactgaaccccatcccacagaaggaggccatgcctcatgggataaaaaggcccagggaactcaaagtttttcaacagcagggagaaaaggaaacataggtgagggcagttaattcctaatctccaggttctccctgcttcatgggtacataccgcatttgtacctgtggccggcacctgccaaggttgccagggcgcaggggtaagaggtggaaagtgaagtgaagatgcttgctttccctccccatcacaccctgagctttttgccaaaagaaggaagggaaatgaggaacacctctattccctgtctttcagaatgggcagccagttctcctcaccacccccagcttgtactccccttgagtgtatcctgaaccattgggactgttttgaccctcagaatccagaggaaaagcatctcatagccctccgcacataggtttggccaaattatggtttacaggaaggactggcttggcttcaggaagggaccattcatttcaataccatcctgcaattagaacttttctctggatgtgaggacacatggtctgaggccccaaatgtgcaggctttctataccttgcaaagcaatccagacctttgctgacatgtaggattgttccagccctcctgtttgctgtctcggggaaggctgccagggtcaagcccagggaattaaagacacgagtcccagacgcacccccagctgacgtgccagctccctcaagccctgctcctctgggtccaccccaacctccgtatccagcttcagcctctcacctggcccctcctagaaatcttcatcccaaacaagcccagtctcactcttgcccctcctacagatgcccagtgaatttgggcccagtaaggtccaagtcctcttttccctacaagacttaaagcaaattaagggagatctgggcaagtgttcagatgaccctgatagatatatagaagctttccagaatttcaccctaacatttgaactctcctggagagacgttatgttacttttgagtcagaacctgatagacactgagaagcaggctgctctgccagcagcagagagatttggggatgagctttgcatcacctatagcatcagggaagggagcgaatattatccaactggaagagaagtagcaccagtgaaggaccctaaatgggatcccaataatgagatggaagactggaagaggagacactttcaggtgtgcataatagagggcttacgtaggtctaagaccaagcctctcaattatactaagttgtccataattaaccagggatttgatgaaaatcccactgccttcctggagaggctaagagaggccttggtaaatcacacctctctatctcctaattcaatcgagggacagataatcctaaaggataaaattattactcaggcagctcctgacatcaggaggaggttgcagaaatgggacttgggaccagatagtacattagaggacctcctgaaagtagccacctcgatcttttattatagagacccctgggaggaatctgactgccgttttcccccaaaacaatgccccctttcagcaggaagcagctaagactggtcatcatccatattctaatggcagttagatgtacctcttcagagggggcaaatgacatgaaagtgaagtgctgggatgggaagggcatgatccctttgaatgatatagaaaaggtgaagggaagtgttggatacaggaggctgtggtccctggctaaaagctccacacctgggcttgtccccacggacctagatgacaacaggcatttttgttttcctgaccgaatgttgtctttcccaagatcatcctggcctgctaagacccatcctgtgcttataaaaaccccaagaccctagcagtcagacacacaggaggcttgacgtcgagaggagcacatcagcggaggaacacacaggcggctggacatgaagaggaacatgacaacaggcaccagcacaccagcagggcaccgacttatagaacgatgtggattttgcctggggcagtcagaggagagccagggctgctgaacggccccaatccagggagaaaccaatctcctttctggctcccccatctgctgagagctacttccactcaataaaaccttgcactcattctccacgtccacgtgtgacctgattcttctggaatgccaaggcaagaaccctaggatacagaaagccctctgtccttgtgataaggaatgtgtctaattgagctagttaccacaagttgcctataaatggcaaaactaaaagaccacacgaccactggggcttcaggaactgtaaacatccacccctacacactgccagtatgagaaaaatttgctgatatgttttctgctgacctgatgacaatgttcctatggtcacactaaccactgctgggtaattttcatcatgactctcgttttcatctgctgaaaccagcctccccaagaaagacaactattttcaaactgaggaaataaagtgttactaaaccacagtgttctctcatggctgttcctggagttcttcaaaacacttgatattataaaatagaattattacagatcactgtatgttatggatttagtcaaaatgataatttaaaatatggtttaaaataaaaaactttattttccaaagaagatagttttttaaacaagaatatccaataaagacagtatgaggtcagctgactttagtgttggtgtatgtgtatgtgtgtgtgtgtttatagtttaaaaggtaaacaaaaatgctttattatttaatattacgcaaaacttttgtttaaaggagaaaatcaaattttatttttgttgaagttaatttttaataaaattttacgtaaaatctatggaattttaatcagtttgactctaaggtaagatttttataaagtttgcataacatttatagttcttttaaagaatagattaatattctaagaaaaccctgctattctgatacatgaacccaaattaaggccttgtatcagagtgtttttaatgaatgtttaatttctttaaaaacaaaataattccttaaattttaaccaatgcttttttttgtaaaatttttatagaactaatttttacaaatcttttacaacttatttaaaccttgagtcttgtcttgttattttttatttttgaatttaacataactttttagaactgcaaaactagacaaaattactgttttttataaaaactatatgttcatgtctttttataactttttattaaaaatacattctactttttcatatactttgtatgagaaatagttttagttacatatattcattataatgttaactccaagcaactccttttaataataaacttaggatgtatgcaattttgataggtagcagttgcaaagcctactgcaagggtcagagctgtagaaaatgtctctttccagcacagagagggggcatggtgcccttcatttgtccccaggctttagctagaacttaaagctctaaaacagacatgtaattcaattatttaaaagattacaggagttgtttatgacctgaaaatatttactaagggcagtatttgacctgtataatttaaaccaaatgtctaaattctgaagatgttctaattttactttactaataattttaaagcatgctttattttttaaagatttttaaagtcaggtgaattaaaagggatttgagttaaagtttttgtattttctgagaaaatatttaggtgtttagttttctaagccgattaatgagggtttcatcatatattttggtagtgaaacattatgtacacatgagacatctaaatatacagacacacagacagaagcagattttatagatttataactttttaattgttttttaaaatattttccatgatttaaaaaaaaattattattatttgttatttgcctagtcaggctatttgagggccgaaagtagtcaagatctatttgtccaatagagggcgcccctccacgccgctggctttttagggagtccgtcgatggaagacctgtaataaaaataaggttgatggttagggctgctgaggtgatgagccctagatttcttctagttcaggagtctaagtcactccgctcatgcagctaagtcattccccagcccagatccccacatagcatcattctccccctgtcccgcacccagactcacatcaccttcttcctcgtctggactcaaatctctctctctgctccccgctccataaggacacttgggattccattagggtctagccagataaaccagaagaacctcccaacattaagatatttaacttcctcaccttttcaaaaacgcttttgccatagaaagtcactttcaccggttacaggcggtagttcttggttacaggaacttgaaaatgttccctcttcatatttaccagcttttgtaaaaagcatgttttctgtcctgtgtacttgagcatgctaaagtcttgtccccttagtgattccaccttctgttgcccaagcactaggggagggtcctgctgcctcttttcacctctgacatttgcactcttacccaacatggctactgatccgttgaaaaggccgtgaatttaaatttaaaatggtgccatttaccacctccctagttcattggccaggacacttcctatcgggttaacttatgacccaagtgacttctaaaggggtggctcaccgtgagggaggcacagcagaacttggactgagtcctgcaggactcaagtattactttttccctttcatttgttttaaatttcattgacttctttggatcaaatagcttacattgtattgctgttttttttttctttaccattttgttggtgaggttttggtgttgttgctttttttctttctttctttcttttttttttttttttagaaaaagggttaacttctattgccctggctggaatgtagtggtgcaatcacagttcactgcagcccccaactcgtaggcttaagcaatcctcctgtctcagcctcctgagtagctgggactctagacgtttgctaccgtgcctaactttttagaaaattattttaaaaaaatattttaatcctttagaaaaaaatgtgttttccatagattccctgtttttaaatataaagtttattgccattgaaattttaagagatattgtggcacactgtcttatgtatgagataacaaaattcccaccagagcaattaataacaacggaaaaggcaatgacgatgtttaactcgacaattaaattccgaattaagcacatgctgatgtctatactaaaagaaaattcatttttatgcaattagttgtacgtgaaatgtgtcaaagaaatacataatctatgaaataaatgatgcattatcagccagaacaagtaaatttggtttgatatctatgtatacacccagtacaatttctgcactacagttagaaaaacttaaaatacaatataacctatttattgtaaaaggatgatgaaacatgaaatatgaacagcacaaatatgtacaagtatcacttctcaatggaaaaaattacgtataaaaaaaccagcagagtttgtggttgaaatatgaacagcatgaatatgtacaactatcacttctcgatggaaaaaattatgtataaaaaacaacagcagagtttgtggatgcattgataatggtaaatcctgtatgttatggtaaacatcttcatgaaaacacatttacaaacattttctctgctgaatggatgatcatgaaaaggaatttgttatcatcacatttgctggactgagcataatgaaaaggaatatactacgatctggattgttgaacttccatccagagaagaaatttactattgtgctacaagctgcagtaacaatctccttgtgatctcagcaaggcctgcagggcaatttacatcaggactcctcttttcctctccagaacttcacttacctgagaaagagtgtcttttgataaataaaatattattaaatgagtgtggtcttatgactgtttccagggtgatttgcaatgcatgttggggtgagtctctggggtgtgtgctgaggaggggtggcttttaatcttgagagaatgtatgaaagggaaagaaggtctccacagcatctgaggggctaaggaccatgaccctgcctggatttaagaaatgggaaggtttcagagggtgaaattaggtgttgagtcttggggggtgtttgagaagctcctgcctcaggagtggaagctctgggggaagtaaagacaatcctgggtgcctcaatggggcatttcctaatttcagagaaatcaaaccaaaaacagtgaggaaatggactccttgaagactgtggtccatgaatatatgtagggaaaggaaagagagatcagactgtcactgtgtccatgtagaaaggaaagacataagagactccattttgaaaaagacctgtactttgaacaatggctttgctgagatgttgttaatttgtagctttgccccagccactttgacccagccactttgacccaacttggagctcacaaaaacatgtgttgtatgaaatcaaggtttaagggacctagggctgtgcaggatgtgccttgttaacaaaatatttacaagcagtatacttggtaaaggtcattgccattctctagtctcaataaaccaggggcacaatacactgtggaaagccgcagggacctctgcccttgaaagcggggtattgtccaaggtttctccccatgtgatagtctgaaatatggcctcatgggatgagaaggacctgactgtcccccagcccaacacccataaagggtctgtgctgaggtggattagtaaaagaggaaagcctcttgcagtcgagatggaggaaggccactgtctcctgcttgcccctcagaactgaatgtctcggtgtaaaacccaattgtacatttgttcaactctgagataggagaaaagctgccctgtggcgggaggtgagacatgtttgcagtaatactgccttgttattctttactccactgagatgtttgggtggagagaaacataaatctggcctgagtgcacgtccaggcatagtactttcccttgaacttaattatgatatagattcttttgctcacatgtttttcattgaccttctccttattatcaccctgctctcctactacattcctttttgctgaaataatgaaaataataatcaataaaaactgaggaaactcagaggccggtgccggtgcaggcccttggtgtgctgagtgctggtcccctggacccactgttgtttctttatactttgtctctgtgtcttatttcttttctctgtctctcctcccacccaactagaaatacccacaggtgtggagaggcaggccaccccttcaaatatataggacccagaaccagtccattggggaggaagctttcaagggacacattttggctgggaaggaggacagtgaagctctccagccagggaggacgcctggcagtcacagtgatctcggaggggccctgcacacttccaccacttccggttcctcgattcctctccaccacacccattttctgagttctcctgggcaccaggcactggaagccgttcctgctctcattcctcaccccccttttcttcattcttcagggcacgacattctccaacatgttcacatccctcaattttccttccccacctgtctggagtctgaagctccaggcactgcaaggatgtgagttggggacctgtttgttctccccgttttactggatctttcagggtctccattgtccaacttactaggagccctgaatgcttgccgactctaccccatctgctccattctgtgggctgtgtcctctctcaaacctcccaggtctttcaggcccaggccccctcctccacttgcttgtgcccaggctcctacccagcctctgctaggatccagtattgtcaacaataaatagatctccttggaatcagggtaactggcaagctcggttgaaggacgtatgagaggatggaggtggagagttcactctcccaaagtgcccctcacacacacacgcaatggggacaatgccagagcctgaccttatttcacagcaagctgcccaaatctcaccttgctcagtgctggacactgaaaacactgaccctcccagtgaaagctgctctcctctgttcttagtccccacgccaggccactctgcattctgtacccttcccccaggctggtgtcccagaccgtactttacccagagagccctgccctcaaactcacttcctctccggacaggctttctgccttaagctgcgcttcttcctcggtggtagcaggaggccttcctctccctcctccctctatgatttcttgcacctaaatgaatctaaccttgctctcacctttgtcccttgtgccctaacttctgttgacaccttcatctggtgcccctgacataaccctggggctcctgagccctgggacatttgtatctagacaaccacgagcctaacaccctaaacagacacaggcatagacacacacacacacacacacacacacacacccagcaccaaagctgctcctaccccagtcacactggaattagatgaaaaccccaggctttggactccttggctgtgagggtcttcctggaaagagccaggtccagctgcattttctcataccctgaaatcgcaccactacaccccagcctgagcaacagagccagactccatcatttaaaaaaaaaaaaaaagtacccaaaagagttccagaataagataaaaatggtttacatacaatctcgctatctgggaatataaagtgcagttactaaaagcagggaatctctttcctgaaactatttctaactctgtgaggagctgctagattctacagtgcctgacagacagctctcaagggccgtttggcttgtgaatggcatttccaaggcaaacatcttgtttgaaagctgctgctctggttaaagaagggtcatgaaagtctttttttttttccagttatttgggtgaagtatgtttttgcgagcaaatttacctttccctctgcgttctccacattttgggttgtgattttatgacaatatagtttgtatattcaacttatacatatttatagtgttcagtaagagccttttaaaataaaacaattgaacacattggttattttcacaagactctaaccaaaatagtatatttttaggtaaaaacccaggaaaattaactcaaaagtagcctatatggccgatgaattcttgctgcattttatgcaaattatcaggccaagtgtaataagcctaaaattgattttgcacacaaattggtcttactgtaatttctctttaataggaaaaatagggggctacagaccaaccaggatcttcatgaggaccagtgagcacaggagtaggaaaggggtcactagcatcactgagatgcaggtggtggccattcctcatagaaaacgagatttttggggaacctcccatagtgctgagctccatagtgcccacggggatgacagaatctgagaatggctgggaccaggacttttgtcatcaaaagccagctggagggtataggcagtaaaattggaatgcagcaaagggaggctgacctgcaaagcactaggagggatctcataaaacctgttacccttagaggcaagacaggtggaaaaagagtaagtatgtcacttagtagacataatcaagaggagcagaaagccaaggtcagctgtccgccatagaatgtcatgatcccttgctcagtgaagacctgagacagtcctcacaccactatatgtttttctttttataacctttattaaaatacagtttattttttcatttacttggcacatttgtataattgtgaaattgttttcttagtagttttagttacatatactcagtataatgttagcttttaggaacccctctttagtaaaaataaaacaaaaacgtaagcaattttaattggtaggagttgcagagcccacagcaaaggacagagctgtggaaaatgtctgactcttcccagcacggagtcgggccgtggctcctttcacatgtccccagacctcagctagaattgaatgctctaaaacagacaggccagatgattatttaaaatgttttggaaacagtttttgacctgcaaatatttagtaatggcaatatttcacatgtctcatgtggacaaaatgtctacattgtgaagatatttttcttttactttactaataatttttaaaactgactttattgttttaagttttgtaaagtcacatgaactaaaaggcaattgagttaacgtttcaatttttctgataaagacttgattgaagtgtttatttttaagccaatgaatgagagatttatcatatattttgaagtgaaacgctatatacacatgactcatctaaatatacagactgaggtcaattttatagatttagaactttttttatttgttgggcttttaatattttttaaaagctttacatcctttatttttgataatttgtgatttccctggtgcaattatttggagcccacagcagttgggatctgtgtatgcagcagagggtgcccctccaagcctctggctctctaaggcctccttccatttcaagggtaattaaaataaggctgattgttagggattctggtgtgatgaaccccagccctctcccacttctgggggctaagtgtttacatgccatcgccctttgttcccctactgggcctcacatcaccttcttcctcttctggactcaaatctctctctgcttccccttcctaaggacacttgggatttcacgagggtctagctagataagccgggagaacctcccactgttaagataattaacttcctcacattcacaaaagctcctttgccacagaaagtcactctcacaggctacaggtcatagttcgcagttacaggaacttgaaaatattctgccttcaagtccaccagcttttgtaaaaagcatctgtttcctgtcctgtgtagttgagcacactaaagtcttgttcccttagtcattcctccttctgctgcccctgtggggagggtcttgctgcctgtacccacctctgacatttgcactcttagacaacatagccgctaatttgttggaaaggcgttaaattaaaaaaaaaaaagtgctatttaccgcctccctctttgacagaagactgtctgtcaaagtaaccccgccccaagtgactttttaaggggtggctcaccaggagggagtcagagcagaacttggactgagtcctgcaggacacaggtattagcttttctcttttatttgctttatgtttcatttacttctttggatcgaatagctccaattgtattgctgttatttggtttttcattttgttgttgggttttttgatgtggtgtttttttgttttgttttgtttctttttgtctttttagaaagagggtttccctctattgccctggctggagtacagtggtggaatcactgttcactacagcctccaacttattcctgggctcaagcaatccttctgtctccatctcctgagcagctgggactctaggcatttgccaccgtgcccaatttttttttaattcctttttaaaaatattttaatcctttccggaaaaaaatatgttttccatggacttgcttatttcctttatacagtccattgtcgttgaattcttatttgaatttgtgatacaccctctcatagggaacataacaaatttcctcccacagcaattaatgacgagtgcgatgagaagcataatgacaatgattaacttgataattaaaaatctaatcaaccaactgttgatgattgtactaaacaaaataatttcatttttacacaaccagttgtatgtgaactatgttgaaaacaggatgcatgactggcggccagaacaaagaagtttggtttaatttctatctatacacccagtaaaatatctgtaataccactggaaaaccttaaaatacattatctatttcttgtaaaagaatgatgaaatgtgaatttgaacagcataaatatgtacaagtatctcttctcaacggaaaaaattatgtttgtggatgaaatatgaaccgagtttgtggatgaaatatgagcagcatgaatatgcacagatatctctcctcaatggaaaaaatcacgtacaaaatataagaacccagtttgtggatgcgtgaataatgataaattgaggccgggcgcggtggctcacgcctgtaatcccagcactttgggaggctgagatgggcggatgacccgaggtccggagctcaaatccagctcgaccaatgcggtgaaaccccatctctagtaaaaatacgaaaattagccgggtgtggtggcgcatgcctgtaatcccagctactcgggaagctgaggcaggagaaatgcttgaaccctggaggtggaggttaatagtgtgcccagatcgcacgactgcactccagactgggtaacagagtgagactccgcttcaaaaaaacaaaaaacaaagaataataataataacgataaatcctatatgttacggtaaaaatcttcatgagaacaaatttactatcattttttctactgaatggatgatcatgaaaaggaatttatttttatttcgtatgatggactgagcatcatgaaaaaaaatactaccttttggattgttgaacttccatcctgagaaatttactattgtgctgcatgctgcagtgatgatcttgtgatctcagcaatgcccatggggcaatttacatcgggactcgtttcatctctagaccttcacttacctgagaaagacaagtgtcttttgataaataaaatattgttaaatgcaatgttgcctcatgattttttttttcttttccttttcctttttttttttttttttagatgtagtttcactcttcttgcccaggctggagtgtaatggtgcgatcttggctcgctgcaatctctgtctcccaggtttaagtgattctcctgcctcagcctcctgagtagttgagattacaggtacacaccacaatgcccagtgaactttgtatttttagtagagtcgaggtttcaccatgttggcctcgctggtctcgaactcccgacctcaggtgatccacctcctgggcctcccaaagtgctgggattacaggcatgggctaccacgttcagccatgattgtttccagggtgatttgctacacatgttggggtgagtctctgggttgtgtgccgagcaggggaggctctcaatatggagagaacccgtgaagtgggggaggaggtttccatggggtctgagaggctgagggccatgagcctgcctgggtttaggaaatgggaatgtttcacagggtgaacttggggtttgagtcctgagggtgtttgagaacttttttcttcaggaggggaagcttcaggggaaataaagacaatcctggatgcctcaaggggcatttcctaatttcagaaaaatcaaaccaggaacagtatgaaaatggcctccttgaagacggtgttccctgagtacctagaacccaaaaccggtcagttggggaggaagccttcaagggccacattttggctgggaaggaggacagtgaagctctaccgccaggcaggaagcccagccagtgtgttcccagaccaaactcagggtctggctgctatttctcacggcccaataacgagatgcagataaactggggaggaagagagttttttatttctggaaccggttacagagagaaggcccagaaaatatctccagaccaactgtaaattacaaggttttccagagcttatatattttctaagatgtatgtctacgtgtcagtgtgcatttatctaaagatataagtgattaacttcttttaatctgtaactctagtctaagtcttggagacctttctctggagcctcagtacatttacttaaatctaaatgagtccaggtgctggggctattaccctgaccttgtctcctgctcaatcacagaggtttggggggggttcctttagacccccaatgaacttgtttgtggaggcctggcgagtttcttcagacccccaattaaatttgtttaatcctaaacaggtctggttaagaattccttctttgttttgtcatgctgtaaggcccaggaaaggcctaggtaaaacccttggtgggcttttgttacattctagcctttgtagaaaggcgctggcactttcagcttttgatactgaacttaaccactcagtcagtactgaagtagttgtgatggggacctccattagtgaaatctggcctgccacaatccccactgtcaatttgcgcatgatttctatcatgcttgtatatttatttatcacaagaatcatagggagatggagcattgtaatctttctggctacttcctgctgagagggggtcatcgttatggggcaccgaatgcagcactggagtggaaaaagtcgatttgttcccagtagcactctctgtttcgggggtgtagaggcagcacctgctaaaacataatagtaggcaacagcaacacatataaataggttgctgctacttccttcagaagtttcggttgtctagtcttcagttcacagggctttaagaaagcacagcttaggtttcagtgatttccaattaagaaaaatggggaaaaagggaaagaaaaaggaaacaaatgaaaagattatttaggagacttgtagccagagaaatacgaatttaacccaaactgtagaaaataataaaaactgaatgccagactagaatttaaaaacaggtgtactatagtttccaaaagtttttgaaacataacttccctctctccagttacccttttttgttgttgttgttgagatggagtcttgctctgtcacccaggctgtcgtgaagtggcacgatcttgactcactgtaacctccgcttccctgcctcagccccttgagtagctgggattacaggcacccgccatcatgcccggctcatttttgtatttttgtagagatggggtttcaccgtgttggccaggctggtcttgaactcctgacctcagatgatctgcccacctcagcctcccaaagtgctgggattacaggagtgagccactgcacccgaccccagtttcccgtttttactaaagacaaattacgacaggaccaatttgctttattatgctttgccactttatttgtacgaggtgcagcaagaataattatttttcacataggcttttaaaattggttttaatgggactttgttttatagaaggaatctgagataagactttttaaagctgagcccctgccatggatttctaccatcaaatacatatggttgggtgaattcctgtcctcttgaagtttcaagataacttgggattcctgacctgtcagaatgtgacattcttttcttcccacagatcagtaaccctgtacagggactgtgttcacaggatataaggtcagttttccaaaggctttattagctccacaagtcaagtttgattccttaaaggaaagcacagcattctggtcaaaaccttggtaaaataaccagtttttcaaattgtgtcctgttaccaaagaaaacacattcttattgcacttatgcaaataactatattgccataaattaagaatacccacaaatagtttccaaattctggggaaatcgggtagagagaaacaaataatgctccaaatggtgttcataggagtatattttgattaatcgttaaaagctgtcaatagctcaaaagaaaatttgccttgactctgaaaagcaaaacaaaggatcagcaacgttttaagcaaaaagtcaaaaagatcacttcagcctcctattagttcacttcatgcagttaattcctgtcctgcttgatatcaatgaacattttagctctccaagtgtcccgaacatttttcctctcttctgatgtcacaatctccaaagttatcaaaatttgcatttaagagcacctgttagggctttatagctgattataaaattaccttctaaagagggccaaaacaaggtaacatgtgtatatgggtgactgaacgttttagggtagtcatagtcaaagacacaattgacaaggaaatctgttacctctgtggcccacaataatttaacatgacaattataattatgactgataatgtacactgagatatagcagaattataggagtctcccataactttggaaccctcatcaataacatatttatagaaatatagcccaaagaaagctaaaaatcattttatatttcacaatgcttcctgtatgatttttgtaccaaataagccaaatttcacctttacattagtgtactattaatgttaaacctaattcttaataaaacctgatagacatatttacccaattttaatgtttgaccataaggtaacatttttatagactttctataaccctttacaatttttgttaaagagcaggttagtgctctaagagaaacccattgtgtttttatttcaatgctcaatttacagaaatgctgaattataccccttcaactttagtcaatatgtttacacacaaaaatattttaattaattttttcataaacctttcacaacttgcttaaacatttagctttattttatccaacttaaagcaattctttaaccttttaatctaggcaaaaaaaatccatcttctcataagagctttagagactcttaggcttctttactaggacagctgagctctaaagcatgtgaacttcacccaccacaactgtttgctccatctcaagctcagaaccctgccctgtctgcctaaccacaagtgagtatttcctgccttgatttcctgacatttctatatttaattcagcttgttaagttccaagaaatcccctggcaatttttattattgacctcttcttctttgcacaggtatccaacccagtatctacaaataaatgcttcactcatctactcctttcatgaaacattgcaaatctttttcttactagtgcttgggcttgcttttttttttttttttttttctttgcaaggaaacatatagatgagcctcaagagatttagaaatcttttcagagtaaccagctgaatgtcagaaagtcatatttggaggccaatctagttagattagataaatagtttttaattttaacaaactgtcttccttttctaactggacctctgatctcacagaagccaacaaagtatttgcagtttataggatctaattttaaaatatgtgaagagtaggcacatctggaaggcagggcatctagatctttgaaaatcaaaaatcccgaatttcacattgaatctgaggtctctaaaagaagggacatgccacaagaccaagccacacaatttttccacactgcacaatgctgtagaaacatgtcttcaaggctagtagcacagcaacaatcagcccacttttaatcagaccatccccaaaggaaatcatattcattggtggtgttttcacagcctttaaactgtgtccaaactgcacctttctcatctaaacttgcaaagaaacaaggagccccctgcaatcacaaccatttattgcaacggctctcagccatctccaaactgcagccctcaccagtgacccagcagccgttgcactcacaaaggacgtgtctctcacagtacaaagtaatgcctggtactcacaaaaccaaagcaatcagccaagatgaaataaaagagagcagagctgcagacctggaggagcctgtccctgactctggactccacaaggagaacaggagacccccaaaaggggtgagtgggatctttttgtgtatttctcaaggaatttcagagtcacttaaaattccctctagatcccttcatgtgataccaaagatgccaaaaggaaggtaaagaagggaaaagaagaagtacatgggagaggaattccttttaaaaagaagtgagcagaggaaccaagcacctatttgttttaattcaaaatctaattttattttgtcaaaatttcaactcttattatagattcagggggtacatgtgcagggtagttacatgggtatattgtaccaagcaattaatttctaaaacggagtttcactcaaatccaaatatttttcaaaacaggaggcaaaagagaaaatccagaaagactgtatgtacatataattaaatattagcttttcatgaagccgacttctgaccatagagctctttgaaaaagaaaaataaaaccttccagatctcttataatcagattttagccaacacaaagaattgcgatttccactctttaaacttttttttaccaaaggtaatctcaccaatactaaataggtaaaaaagtcaaatgccacgcaaacattaaaccaaaggcgctggggccctgactgggaattgaacccaggccatggtggcgaaggcataaacttgaagctaggccacaatataaggcacctttcattgtgaatcccacagaatattgaaagcaggcagtatgaacttcaaaagatttttttggcagggggtcagattttttatctttaattttatcagaaggatttttaatgcaagccatgaaatcgttacatatctcctttgaaatttgattgtcccatgagtacaaataggtcaattgtttagaataaaggaatctaaaatctttttataaatttagagatttttctaatttaacagatccatcctttgaccactgcttagaatttgcgatgccatacttcttccagtagtgattcaatccaacacctacttcataaaaagccaaggatgtaattttttcagtttagtgtaagctttaccatttaagaagtaggtatttttgtaaagggcctgaaagaggcaatcccaaagatctcctcccctccaaaaattactcccagaattcggctaagatagcaaaagacccttgtttccacagctaaggatggagtttgtgtgcatgtggtgtctccagtaagacaaatctgtgggtcctccagtcacagacccgttactctgtggcgtgtcacttagaatccttgtgtgtctcaccctcagaaaattcagagcttatatctcctaatccagttttaccccaagcctttgttcctgggtgagccaatttggagattcaggaggtattatattgtagttggtaaatcaattgtgatgtggggtcctgtcgggttcgatatcacaagcagtatcagcatgtgaggaccagagctgtgaactcaacgctgtcaatcgacagcttttaggagtttctgtgaggactgggtggattcagggaccctgaaaaccatacttgtcacccttctagtcctgtgtgtctggaactagaaactctttggtaagcatgggttctctctcaggtccctggacatccctaaaaagagagagcatgtttacattgcaagtgaactggcatttcctttctctcctgcaaaatggtctcgtttgtcaacaggggatacatctctcttccttttgggaagtgggaggatgtaggttattcagtgctggtactttgatttagttcctacatttgatccctctacttggtgtgtaaggtagatgctattatcctcatgttagagatatggaaatgggctcagggtggatgagatattggttactttgggagaagtagcaaatgatagagccagtactgagccctggactatctccaaaaaccatgccaagagtttcgtctggggacctgagcctgatcatcttacttccatgaaatggggcctattttcaggcgataaacaactctacagaaaatgtgccattttaatgcaattccttttttcagtgttactctcctacctttacaactattatatgctcaaagttaagctaagtttcgtggaaaacagaaaacaaaatgcttcataattataagtcatgagatctacatagcatttaaaatttctctaaggcaaaacacatagatgaaattaaatggtgaaagtcaacctgtaaaaaagtgttttaaattttaaaaacatttgactatctttgaaacatctatctatctattacatctccttataatataaaaaacccagctgggcacggtggctcacacctgtaatcctagcactttgggaggccgaggcaggtagatcatgaggtcaggagatcgagaccaccctggctaacaggacgaaaccccatctctactaaaaatacaaaatattagccttgcttggtggcacatgcctgtagtcccagctactctggaggctgaggcaggagaatcactttaacccaggagatggaggctgcagtgagccgagatcatgccactgcactccagcctgggtgacagagcgaggctctgactcaaaaacaacaacaacaaaaaaaaaccttcaacatttatacaaacaaataaatgtctctagtataaaaattaacagaagctatgagaaggcagatcataaatgaagtgcaaatgctgaatgagcacaggcaaagattcttatcctcagtaatagataattaatcataaacttaaacgatgtattaaaatatatattctctgtttaaaaagtaaaagacaacatactgctttagtaagccttaattaaacaaactttcatggtaaaatttcattagagaatttgtgcaggctttggggaaaatcatgtattcattggtttggcatctctgtctttaaaaagccacttgagtgtcacactttaataggagatttgaatacattcctacctgtaattgataaatcaagcagtcaaatgaatcagtaaacatatagactatttgaacaatgtgagaagcttgatctaacagatttatgtattttactggaagttttttaaagcacacatggaaaacttaggaaattttgccatatattatgccaaatactacagctcagaaattactcatcgattgtatgcactgcacagaccatgttttgtggccactgtgctaaattagaagaataaaagtataaccagaaaatgtatctttagaaacaacatttcaaataaaacatcatggatttaaaaacaagtgataattaaaatttgagaatatgtcttaccaaaaatgaagactttatgtaaaagcacatagggtgtagctgaagtggtacttgtgggcaaatgtaaactgctaaaatgcttacagtagaaaagatttttaaaagaggtggtaattcatgagctacttacccatttttatagtaagaaaagagcaatgtttcaaacaggaaaagaaataaatataaaggcaaaaaataagaaaatagttaatatgtatgaaaaaagaatcaacaagtcaaaagatgttctttaaaaagcaaagttccagcaggattattaagaaaaagtgagagaagacgccagtactcataaataggaatgaaaatggcaacagttacagacaacagacaatgaaaggacactgagcacccttatgccaaatgcattaaacattagataaaatggatgaacacctagaaaactaaaggaaaccagaactgggtcaggcaggaaaagaggctggatgtgatgctgcatgcttgtagtcctagctactgggaaggctgaggcgggaggatctattgagatcggaagttagaggctgtagtgagccaggatcaggcctgtgaacaacgttgcatctcagcctggacaacagggcaatacagagagacttcctctcaaaaacaaaacaaaacaaaacaaaacaaaaagcatgagtagccctatcaaccaataatgaaactgaattggtatttttcatccttccaatacaggtaacaccaaagccagattattttacagagttctcccattattcaagaaacagttaattacagtcttacacatactctcccagaaaatggaaaaaaggaagcagatgcttagctcttttatcttttcctttttatttcttctttttttttcttttgagacagggtctcgctctgtcatccaggctggagtacagtggcacaatcatagttcgctgcagcctcaaattcctaggctcaagcaatcctcctgcctcaccctcccaagtacctaggactacaggtactcactgccatgcctggctaatttctatttttcatagagatgggggtctcactattttgcccagactggtcttgaactccaaacctcctgccccggcctccattagggctggtttcttagctcttattgtgaggctattataactttgacccccaaaccagaaaaaaatacagaaaggagaataacaggctaatctgagcatatacaaaaaatcctaaaagaaaatttagacacaagacagcagtaaataaaacagatattgttcagtgacaagtgggttttctcccaagaatacagttaaacagtagaaactcagttcaatgtaattcataactttggtgacttaaagaaagtaaatcatatgaatttttcaaatgatgtctccagaaaaagctttagctcaaattcagcctgaatttatgctaaaaactcagtaaaccagaaataaaagtgaattacctcaatctaaaaaagagcgtctacaaaatgctacagaaagcatgctttatacaatcagagagcaagacaagggtgttcaccatccccactttatgagaaaaaagaccccacaatatatagagggatattgccttgcagcaagacaaaaatataaaataaaaggtccaagaaataacaaagaagaaacaattataatttacagatgacattattgtctatatggaaaactcaaaagaatctgatatattgttagaatcaaaagattgttgaacaaggttatcagatataaaaatccatatatgagacacaatgacatttgttgaataacagcaaatgcaatttttaaaacaaactttttgagacagggacctcattatgttgcccaggctggtcttgaacttctggactcaagcaatccatctgcctcagcctcccaggtatcggggattacagtacaagccactgtacccaaaaagtgcaattaaaaaaaatttgtaatagcaagctaggaagaaagactttcacatgcaaggcctctatgtagaaaaacatgaaacctggttgaaagacaataaacaataactaacagaccataaagatataaataactaaacaggtgggggtgggggagagagagagagagtctgtgttcattaataggaagacttggtattatgaaaatactttccccaaattatgtatagaattatgaacttccaaataaaatccttgcagttgtcttttagctggacaagccaattctaaaattcatgtggtacaacaaagaaccctgaagaagagtaacaagggggcaattgcctactgcacatcaagttgtctcataaagctctgctatttaatatttaagacagcgtgctattggtatgctggtggcacagagtgaaaaatcaggaactatttctacacatgcatagaaactttataataaaggtagcattacagataaattggggaaagagaagcagtattcattcatgattcttgagaaattggtcagtctacacacaaagacccttggggatgtgtttgaattagatagaaaaagtactaatataaaagcaaaatatgatacattctattatattaaaagtaacatctacttaagaaagaacacaggccaggtgctgtggctcacgcctgtaatcccaacactttgggaggccaaagagggtggatcacctgaggtcaggagttcgagaccagcctgacaaacatggtgaaaccccatctgtactaaaaatacaaaaattagctgggtgtggtgacaggcacctgtaatcccagctacttgggaagctgaggcaggagaatcacttgaacccaggagacggaggttgcagtgagccgagatcggccagtgcacttcagcctaggtgacagagcaagactccatctcaaaaaaacaaaacaaaacaaagaaagaaagaaagaaaaaacactataaagaaagttttttttaagaaaaaaaaaagaagaagaagacacaaactgggaaagagatgtgcagcacatacagttgacaaagaatctgtgtccagaatatgtaaataacacaaagcacgaaggaaaagacacacgacacaatagaaaagctgaagatgtcacatcctaaaattgtgtctgcatacaacaggaaatatgtataaagaggtatgtccaccatggcagcatgtatacagcaaaaatacaaaaccaaaaaacaccccaagtggtcaccaaaaacatgagagaaataaaatgtggcatattaatgcaacaggagaatacctaataataaaaatgcaaaaactacagccagccacgcacatctacaggagtgaaatttgagaacataattttgaccgaaaaaaaaagcaagtatttgaaaattcagtatttcttttttctttttttttttggagacagagtctggcgctgtcgcccaggctggagtgcagtggcgcgatctcggcgcagtgcaagctccacctcccgggttcacgccgttctcctgcctcagcctcccaagtagctgggactacaggcgcccgccaccacgcccggctaattttttgtatttttagtagagatggggtttcactgtgttagccaggatggtctcgatctcctgacctcgtgatccgcctgcctccgcctcccgaagtgctgggattacaggtgtcagccactgcgcccagcctcagtatttcattttcaagaagtttaaaagcacataacgaaatatatggtttttcaggatgcagagtgtggttgaaaataataacagtaagagtattctaatattttgcatattggctactgagagtggggtggggaatggaattgggttgggatacacagcagagttggggatactggttctgttctttcttaaggtgggtgaagatagtcttgttgttttcactgttgctctccaaggggcaggacactgattgcagcagcccagccaggtcctatgcgaggccaccgctgtcctggccaccccgggacaggggccttggctactctcccacacctgtctgggctgttcctcggcgcttctgaaatcccatcccagccagggaaggaaccctggtggggtggagtggaggcgaggcactctgtaaccccatcggggtgtggagcagctctaggtcccaaaaggccactaggcatgcgcaaggtcgcacatgcagaagagagacccctgctcagaggccagagccggcatgaggcggtcagagaggatcccctagtggtggaggtggaaaattgcaaggacggaaaattccgcgtgaaaggcggactttgaacagatcccatccagggagctgctctgctgcagagaaaactcggacccagaagcagctcctctaggaacggattagcttcagggttgtcaccaacctgccttgagtgaagggcaagggggtggtcccttttccactggacgccatttccctggacaaggggctctcagcacaggacctaggcagtggctgggggctggcacagtggtggactctctatcccaggccagccgaggctccatggagctgccctaaggctcagcctgggcggattctgacttagaggcttcagtcatcatcccgcagatggcagcttcacccattggcccctcagccaagcacaggcaccaagtatctgaatctgcagggcctctggtactgggcaggatcgccatggcaacaacacatcatcaccagggtaaacctagcctgtctcacctggtctaaaccagctcaggttctctgagtgggtgagcaatcgtagaaattctgccttacaatgaaaaaaagaacccacagacagggatgaaaaatcgagggcattgtgaacgcttgctggccacaagccagctagccctgtggtaacatttctgacacctcctgcttaaaacccaaaaggtcagaaagatcctaaggccccgctttcaccttctgaattcctgccgcaaataaagaccaaggagtgagttatttattatttatttatttatttatttatttatttatttattattttgccctcctgctcctcgggaggcttctgtcctgagctcgccttagctaatcctgcgttaccgttcggcaggtgtgcgcctcaatctccccaccttaccgccagggaacttagcctgacgacactccgccccatcgggtcagggaaaaacggtaggagtagtggaatttcacatttcgccctctgcctgcatggccagtcaactccgcccctcgcggaaacagggggtgggcgcgggaccaactactgatcccctcccctgtctcttcacagcgctgcagtcaggctcagccgatgcttctttcctgcaggttccgccgagcccgtcccttggcggtggtgtcactggatgctgggaagagatggtgggaagagcctccatccattggcgcgtcactaattagacaaggaggccttgggctcccttgagagagtcacggtttctcctccgttgacccgcccttcattgaactcctttacttggatattcagagcgctggacagagatcacttggcgctaacaccctcggaggtcctcacggcgctccgtcggaatgacacagtcggattcccaagctgcgaagggtgagggagggactgcagcgcaggaactgaggaggagaggcccgcgcgcccactggagccgagcggtgaggaataaccggaccgacccccgacggtgcgtggtgagtctccccaacctgcaccattcgcgccccgaggcgccccaagcgcggctgggaggccagctgtggctgggacgattcactagaagggccggcctgcgtcgagtttccagggtggccgccagtgaccccggcggggcccatcccccttgccctcagagcccgccccgccccgctcccctgtggcaccgccaccgctactccaggaggcacagtggggaggagaagggggtggggagcctaaggagaggagtgaaggtgtcctggcctgccttggggaaggggcgggggcgggtgcctctgggacacccagcccgggggatcagccctgagagccagtccttaccctgaagttacagatctggcttccagatttctgtaacctaccttgttccaacacaggcctgaggctgttcctgttagagacctgttgcggatacgggtagggccctgcgggagatttacatctccagtcttcccccccgccccccgccccccttgtttttcacagacaggctagagcagcggcgctatcatagctcactgcagcctcgaactggtgaactggagggatcttcccaaccatcttttgtcttttttaagaagaaaaatacaaaagcttttatataggcttacacacagctacagagcaaatctttatcgtatatccaagattatcaaccacttgactgtacaaccaggaatcataacacatttgagaacaaccagtggcaaaataggaaaatgggccaatgaagaagataggtgactaataaataaaaatctgatatcaagtgtaggcaagttgtagggaaaatgggtgatgaacgaatagaacaaatgcctggggtaaacatcattcgaaagcccagaaagaagcttttagacatctttattgctttttgggggggcggggggggtggggttctggaggattgatggctgaactctcatgaaaagggtgcagtcagagaacaagaaagagttcccaggaattaaaattgtaaacagaaaagcaaattcagggtaattgctgaaagacccaccaaaggatctccaagatacaattgagaaaatcaaccctaacataaaggcaaaagacaaaggtgggttatttgagcgagaagtggtttgaggatttgcaaatatttgtttagtattgaatatgtgccaagcacacattacagaatacgttacttatgggaagtaacttagccttgaagtagctctgtgaggatgcatgtgtttcctttacctataattctataggaaaggcaatttttaaaaataaatcaaggttggatttcatcaattttacagaatacgcataactttataaaattttcaaaattctctaaaaacctattgagataattaaacaagcgtttttctcctttagtctgttaatgtggagaagtattttctgatgttgaaacatacttgcattcctgatataagccatacgtatgataacatattttgcttgtttgctattattaattctgaatttggttcactaagattttgtttgattttgcatgtatatttgtaagtgagattggtctataattttcttgtgtggttttggtatcatgctataacagcttctgaaaatgtgttagaaagtgttttcttgttaaagttttaaaccttctgagaattggttgaggaggagcttgaaaatttgttaaaattcaccataaaaatatcaggacctgaaattttgttattgttgtcagtaaataaaaattatcaactgtctttttaattgctttactgattattgctctattcataatatccattttttcatgagtcagttttggtaatttacatttatcgagatagttgtccgtttcatctaagttttaaaatatattggtacagctattgtggtattctctgaataattttaaaatctctcttgtgtcttcctgatttgtcctatttaaatttttttgattaatcaatttatattttcatattgttttctctctctctctctctcataatgttatggtttagataggaatggtccagggtggaatgacacaagtaaagaaacaataatgtggttttgtgtactataaggaaacatataaaagaaggcatgggaatacaaaggaatcaattaattgcacattaagtatttgttaaggtccaataatttgaaaaatattaagaaaagtgatactgtccttgctggacataggacattaaacagaccctgttaaacaatgttgagaacaaattaaggctatttaaggtagttcgatagcagtcaattataaaatgtgcatatcttgtgattgagcaaatgcacttctagatattactatatagaaatgtagaagtgtgccaagctaaacaaccatagatgttcattgcagccctgtttgaatggtcatagaaaatccgggatgagagtccaaagactcagcaaacaacaatttagcaattttgctactgcataaaagggtgcccccttttcaagcccacaacagagatgttgctactaatcctgaattcaacccagtttgttgcacattttaggatttcatcctgatgactaattttagggtcacctatatttggttaccacctctatttggttgcaaataaaaccgagcacaagttgactggcagaaaaagagactgtgctagctcatatcattgtaaagtcagccagaaatttggcttatggcaaagtttggtctaagactcaaacaatctcgctagatctcctgacagtagggaagatggtgggtcccagttttttttgttttgttaatcaatagtgaggattgggaatgtggagaagaaaggaggaagatgcagtaaaaaaaaaaaaaaaaatgctttggactttccagaccctgcatcattttgttttgggattggcttccttcttcctttttagtgcttcatgattcacccttcatcctacagacataggtgttgatgatggatcattgagggatgtgcttgacattttgggaacaagtggcctttgaggatgggactgtggatgtggcctctgtatcccagtcagataaaactatacagaaacataattttcttatatattttggatattatcttcttatcagatgtatatatttacaaatatatatgtatatatttacaaatatattctcctcccatttgtaggttgtctctttgctctgctggccttttttttctttgctgtataaaagctttttagtttgatgaaatcccgtttgtttatatttggttttgttgcttatgctgttgagattttatccaaaaactctttgcctagaccaatgtcatggattttccccctatattttcttctagtagtttcatagtttcagttcttacatttaagtctttatttaatacattttgagttaattttttgtgcatggtgagggatagggtctaggttcattcttctgcatatgaatatccaattccccagcaccacttattgaagaggctgtcctttccccattgtgtgcatgtggctccttggctgaaaatcagttagctagagatgcatgggtttatttctgggatttttattctgtttcattgatctatgtgcttgtttttatgccaggaccatgctgatttggttactatagctttgcagtatgctttgattgtcaggaagtgtaatgccactagctttgttctatttgtttaagattgctttggcaactcagggtgttttgtgcaggttttaggaatttttgtggtttctaattttaggatcttctacttcttcgaagaatatcattggtgttttgacagaaattgcattgaatctgtagaccactttgggtggtaaggacattttagcaatatcagttcttccaattcatgaacatggaatatcttctatttgtgcgtgtgtctttttcaatttatttcatcaatgttttacagttttcattataaaggtcttttacttccttggttaaatttacttcttttgtttcagctatcataaaagatagcttaaaaattttagcagtagatagctaagaataaattgtattctttttcagataattcattattggctattactggtattactggtggactattgcatagcatggttgattagagttaacaataatgtattccatatttctttttttttttttacttttattttttgagacagggtctcgctctgttacctacactgaagtatacagtggcacaatctcaactcactgccaactcagcctccccagctcaagcaatcctcccacctcagcctcctgagtgactgggactacaggtgtatgccaccatgcacagctaatttttgtctttttgtagagacaacaactcgctatattgtccagccagcatagtcttgaacccctgggctcaagcagtccacccataatggatgagaaagtgttgggattacagctgagatgggattgcggggggcgggttggggaaggtgaggttcagagagggcagggcctgcagggagaggggctgcagggagctagatactgccccccaaggaggagggagcactgttcccatcagagtgcacatctccttgcagcagctgcacaaatagagagccctggccaggctgatggagcctcccatgcctgctttgccccagggtgtggattctgaaatctgtgcccctaacgggtgggactgaggtccacagtgacatcccaggggaatctatgattccaaactccagccaccccgcctacaaaataggaaaacgctatgcttttcctattaaatcccaaattccatcagtgcaagctctcaccctctaaatcagaaagttcagtcattcctggcgtcctcccacacccccagcctgacttgcagacacacagggtggctgacacctgtccctgctcctccccctggcccagctgctgtgcatcctggaggtgatgaatgatcaggacaagggagcctagagcgggccccacagctgtcaggaagccaggactcagcctccaggcggcagtcaccctggtgccacagcgacagcgctgatggccattctgaagactgggggtgtcaggagagctgggcgtcccacagaactgcacagaataatggggaacgagggtgacacaggactcaggatttcagatgggtaggtaggctcagctgggagctcagggacagacctgaggagcctcagtgggaagtgctgaagtggaaagttctggaatgtttcaggaaaaaggctggaggcttagaggaaaggctgtcgctcctaatatggctggcaaccctggatgggctgtgttcctcccacctgcccatcctctcactgctgccacctctagggacacaacctctcttcatgtccaccttcccaaactcacctgcactcctccattatctgactttatgtgaaagcagtgctaagatccctctcctgcaatgcaagaaggagatgagaggcccgggtccccacagacaactcagcagtggggtcctgctgaagtgggaccgggcagaatcatgcactcccaacatcctggatcctgactgggggtaacagtgaagttcaaagaccatgccatcaaaatctccagagtgaggctcctccctggggtccctgaggtctgtccaggagctgctccctgagcaaatctagagcgtggagggctggggttgtggcagtaaaagcagccacatttgtctcagggtggaaagggagacggtgagctccagtaagggcaagggcgccatctagtgggcgcctcctgctaaggagcaaggagaccaggagagcggagatcagggctggccttggactaaggggtgagttcaggtggaggggactgaggtgtaaggaggcgggtgaagtggggaagtggtggggagacatgggaggagcaggtgaggggaagcttcagggaagctgcgggagggcacagcagggctctccactcctcagcattgacatttgggtggtcaaactggtggggctctgtgaactgcagggtgttcagcaccatccacccactcaatgccagcaggactccctcccccagctctgacaaccaacaatgtttccagactttgccaaatgtcccctagagggcaaaatttcccctggcagagtcactgatccacactaatctctaataacaattcaccagtaaaatccttcacttgggagaagaatcgcatgtgtgggaagagtagaaacttatatcttcaatatctgtcaaaatggctttcatttattccataatttgatgtaccaggagaaggcatgtttagagatgatgccatttggctgcctgtacctcacagcaggaatgacatgggctttccaaggatctatacaacaaaaaccagaatgacacacactgagttacactacaaagtgggacatgggggatcctgtagacattgaaagaagaaaatgcatgaccccaaggcaccagatagtccactctgatgctctcaccatcctagaaaacatctcagccatgaatgcagtcacatatgtcattaggaaggaatgtcttattaaggggaaaattgtagcaaaggaatttctgtttatgttcaaatttgtagacttttgtattattctttaaataagaatctactctcccccaaaatgaatgcaatcagtgtctggacagtgttggggtcttactcctggcccctgggagctgggagctgacagtgccctgctgccccagccctgggccttctctgaacctcaagaacactggatggcccccatttagggagtagagaggagaggtcttttaaacatcctcaccagtcacctctccacctttcagaccctgggcagaatctgttgcccactcttggatttgatctttaagttactgactttaaagcattttgacacttttttttttttttggtagtcagaagctttccacctccttgggaaaagtgattctctactctatgtacaggaataaccagtagaaatagagaaaaaatgcattaatattcagaaagaagatgatctctatgtgaacaaatgaaagcttaaaatcatcagagtcaacataaaatcaacattgccagtgctaaaactacaaaagtgacattaacggtgaactagaagaataaaacaagcattacagttgctggtaaacctaaatcacttatttttttaaaagaccattctggtatattgcaatgatgacaggagtgcccttcagtcaatatgatgcctgtaatttttgtgacctggcaagatatactgtcccttctccttttaaatctcaaatgcaaaatgagaggcaactcctgggtcaccccctcccagagcaaactgcctgcaagcagcccctggaagagcagaggccctagtttccctgatcctcaaggcaggagcgatgggaagctccctgtaagccgggggagagctttgttcccagaatgttcctcctcttcccagaggcaccaaccccgatgccctgacacttaccttctgctctctcgcccaatgttcactcaaatattgagtgcttggtgagtctgcagagctcaggaacttctgggagccaaatcaccaccagctcctccagaaaagatacctgtgcacacccaaaaccaccccactgagccctgcctggggtctgtaccacatccagcatgtgcactgtgagcatagaatccggccctgaattcatgaccacccaccaacatgcccccaactgaaaccagcaaattcccacacatggcaagcactgaggcttggaggtgctttctcacgaggtggttctgcttccaccatggggtggttgtcactgacactggaagttgctcagcacctgatagtggtgcaggactcagggaccctcaacatcaatctggtgaaggcagatggggcccctccagatcttctcccacctgcaggtgcccagctcagtaagaccccaaccctgggaggaggatccagacccctgtgccaggtagaccaagcttgaggcctcaggcaatgagagagaaggagatggaggtctgaccaggagctgctcttccttgagagcccgggtcccttccttgtgcaaaggcttggcttatgaacagaatcctcaatctgtagtgacagtgcctaagaggatgacatggactccggcctgatgtgcagccgtccctgtctaacccctccctgctgcaggacagcaccagcccaggagaggaatcctcagttggggagccagtaagaacatggaatactcggggcctcttaccttcctccagtccacagcagcagccaccgtttgtgcctaggacacccacctgctggcccttctgacccttacagtcaggccttccagatgccactcctgactcaaggcccagctactttcaccctgctgagccctgctcctcccaaccagggtcactgccttgctaagcacctcctccagctccagctgactggtcacccaacacccaaaccccagaggacaaacaagaaaataaacagatatgaagtctgaaggagatgcaggctatgaagacaaataaaagagtaagcatgaatataactccaccaacaaaattgtttcccaaaacaaaatcttctgtgcccatgatcatggaactaattgtccctcactatgtaggcaagcacttccagggtctctcaattatttcatgggtgtcaatatacactgtaacatagcaactcagaaaagaaagtgggaataatttatctacttagattaaggtcctaaaaaggtctccagactgccaaaaaaggagagctgaaccactcctgctttgagaaccattgaactacatcttttttaaaagtcaccccagaatggccaaaacaatctggaaaaaaaaattggaggactcacttcctaatttgaaaacttactaaaacactacaatcattaaaacagtgtgcttctggcacaagaatgcacatagagatcaatggaatagaatcaagagtccagaaataaaccctcaccattacagcccattggtttttgacatgggtgccaagattcctcaatggggaaagaatggtagcctcttcatattgtgctggaacaactggataaccacatgcgagatagtgtagttagacccctacctcacagcccatacaaaagttaactcaaaatgtttcaaaaacctaaatggaatagcaaaacttatcaaaccattagaagaacatataggagtaaaacttaatgatcttggattgggcaatggtttcttcaatatgacatcaagagcataagtaacaaaattaaaaatagataagtgaacttcatcaaagttaaaaatgtttgtgcttcaaagaacaccatgaagaaagtgagaagacacagaatatgagaaaaattttgcaaatcatgtaccccataagggacttgtatctaaaatatataaagaactattacaactgaataataaaaagataacccattttttttaaacagcaaatgatttgaataaatagttctctaaaaaatattaaaattgtcagcaaatacatgaaaaaatgctcaacttcatcagccaccagggaaatgaaaatcaaaactgcaatgagctatcacttcacacctactagaatggctataagttttaaaaaatattaaatagtaagtgtttacaagaatgtagagaaaatggaaccctcgtatattgctgatgggaatataaaatagcacagcaaactggaaaacagtttggctgtttctcaaaaacttaaacatagaactaccacatgaccccatatttatactcctatatgtacccccaaagaaatgaacacagaaacccaaacagatacttccaagtgtaagttcattgcagcggttttcacaatagcaaaaatgtggaaaccacccacatgtccattaagagatgaatgaattaaaattgaggtataaacatatattgggatattactcagccataaataggaaagaagctgtaatatatgctacgacgtggatgaatcttaaaagtgttaccctaagagaaataatccagaaaaaaataatacacgtatataattccttattatatgagacatgtaaactaggcaaattcacagagattgatagtatcagaggctaccagtgggtggggcagggggaagtggggagttattgattaaaagtatgaagtttccatttggtataatgaagattttctggtaaaaaattatggtgatggttgtacaacattgtgaatagaattagtatcatttaattctacacttaaaattgctaattcagtacatttatcttatgtattataccatatctaaagagatctttgggaaacaaacactcgccctgatcagatagtcctcatactcatgtacacacccttcctgaccttctgtaaaaagggatacaaagatttagggacatgagacagttcaggcaactgcagatccacaaaatatatgtatttgcaaagagaatgagagttaagctgggggcacagaccccagacacggagagggtccccctgaaaccttcaccaaggacagcagaacccagagcctcccacctccttccatcaaagtcctctcttcccaggacacacaggacacctccctccacacctaggagctggggatcctcccgagacctccaggcctgggtctctgtccctgggtcagaggccaggctggtgacactgaagatagcgggtgggtccttcccagccatcacccagtgagcccctttctagcccccagagccacctctgtcactttcctgctgggcatcattctgccttcctggagcactggagagcatgaggagacccagggcccagctggttttgtgtgtcacaaagggaaataatctaccggctgtgacagaaccaaggccagaacacagcagaggtcagtactggggagagtgggtcgtcctgttatgaggaccccatcagcgttgcttctcaaagttttgcctagggaaccaaatataggcaaaaaggaaggagaaaggagggacaagggaggcaggactgagaggggaggggacagagagacattgtaggcagagccccgcccttgcccataaacgggaagtgctcctgcctgagaggaagctcagcatagaggaaggaaggacagcagagacaacagtcacagtaaccctgtctagagcgttcctggagcccaagctcctctccacagaggaggacagagcaggcagcagagaccatggggcccccctcagcttgtccccacagagaatgcatcccctggcaggggctcttgctcacaggtgaggggaggactccctgggagtgggtgggaggagggagcacagagactggctggggtctcctggggaggatggggctctgagaggagacagagggcttttgttagagactcaggggagagagcgtctaaggagaaccaaaaaatctaagtgaactggaattgccaaggggcaaaacaatctcagttggtccatgttttcaagttcattgtcagtggccactacactttgaaaatgatagtaaaactatatcacagtgacaatttaaataaaaacaccaccagggcatgaaactctgtcttcatctgccaacctcagacattagcaaataaaccccaggatatggaaggccctgggaacgctcatgaactcatccacaggagtctgcagcctgtcccaggcactggggtgcaactaacatcactcaagtccatgccctcacagagctcacaatctcatgggggggaagacagacacccaaagagatctagaatgtgaggtcaggtgctgacaagagccctggagggaacagagctgggaaaggtcagaaagggaagacccagggtctctagaggaggcttcacgaaagaagtctcccagggattcccttgtgtgagtaggaactgaaggcagtggggagggaaccatgcagacccctgggaaagagggttcacacaaggaaatgccaaggtcagaggtactgaaggaatgagggtcatgctgctgactttgacccagtaggacacacacacacacacacaccctctaaggctgaggggtgaagagacctgcacccaggaccccgtctttccatgccaatgcataggtcaaatattgactgatattctctccctttcctagcctcacttttaactttctggaacgcacccaccactgcctggctctttattgcatcagcgccctttgaagttgctgaaggggagaatgttcatctctctgtggtttatctgcccgagaatctttacagctatggctggtacaaagggaaaacggtggagcccaaccagctaatcgcagcatatgtaatagacactcacgttaggactccagggcctgcatacagcggtcgagagacaatatcacccagtggagatctgcatttccagaacgtcaccctagaggacacgggatactacaacctacaagtcacatacagaaattctcagattgaacaggcatctcaccatctccgtgtatacggtgagtgattcctccgtgcctctgggtgttgggggtcagttctgcttcacatacgcaggattgtcaggcctgggctgtgcctgcatccccctctgcattacgtcccatgttggggtttgggcatttagtgcaggacacacccaggggagacaaactataacagatcagaattcctttcccttatccggactccgtggaaattccctacagcaagaaggatagtctgatgcgggagatgcagcgggggaaaatcagtctcagtccaaccccccttggcctcctcctcatagacatgacctgagaaagatcttataggactcagtcagggcctggcctgaggatcctctgagagaagctcagcccttgaagcccctgccccaggcccctgtcccaagatcctgactccagatgaccctggggagcctgtgccagggctgggttgtggcttcctgggcagggctgattgtgagcaaggatttaccagctgtcccagggccgtggttcctagagctggtcaccaggcagggctcagcccccagagccccatctgggcaagggcagagcctcatctttcacctgagagtcagagtggagaggacagacaaacaaacttcccaggccattaaactggatgggaaacttaaaagatgtcccgggaagtgcactgtcctcaggaggagggaaagcagagaaaagacactctggaccgctccttctccaccaggaatcaggcccagagaactctttttttttttttttggagtaaaataataatagatgatgtttatttggagctattctgtgccaagctttaggtcaggtaattgtaaatattttaatgttaatttacagagaggatggcaagccagggaccattgacatgtaccccattttattaaagagaaattgcatcagcatcacacaggctgtcagtgctcaacgtcacaccaccgtgtgtctgcagcccagaatctggtcgtggccaccaccgtggggcatctgtggaccccaggaccagatgttggttcagctcctttcttcttgggcatcctcagctcagagagggagattctggtctgaggaatgacgggcaaatggagaattagtcagtttttacttagaacgaaatcacctgtctcaactatcagactcaatgccaggattgtccaagcctctcccatcagatccacattccttccctcactggacgtgaaatcatgaatttcttgatttgttgatgtcactcccatgggaggatgaaggaaaggactcagctttctcttcccactacaccctgtacctgcacaaggcccaactgagacacacactcagtagttctctgatgaaggagggagggaattaatgaaaaaagaaaggaataatcataacctctttacagactgggtcctggatgtaggatcctaggaggagctggccacacctcttccttgtcccttaggggctgagacccatgttccatttctctgactgcctgctcctaaagccaccccaggtattgcatctcatgtgactctggggccgctcatctgtgggagggttttcagggctccctggtcctggtctgaggcagctgggtcctcctggtccctggggtctctgaggtcactgtagtccctactgctcgctgctatgggtgtctctggttctctctgctcctccctgtccttcatctttctcctttattcacaggagaatgttctaaatttgactctgagatctctgaggatgcagcatggccccaagacactttctgttggtcactctatccacagagtcagtggctcagccctccatccaagccagcagcaccacagtcacagagaagggctccgtggtcctgacctgccacacaaataacactggaacctctttccagtggattttcaacaaccagcgtctgcaggtcacgaagaggatgaagctgtcctggtttaaccatgtgctcaccatagaccccatcaggcaggaggacgctggggagtatcagtgtgaggtctccaacccagtcagctccaacaggagcgaccccctcaagctgactgtaaaatgtgagtgaccctcggcccctctcactcctttccttgtatattttcctaggagggagggggggtgtaaaatgatacacggaatgagaaggatgagattccttcagagcctggggagcaatgtgggtaagaactcagggattagactcatccagttatcatcctggttacaataggtaccaggtatttgaccttgggcaagacactcaacctcctgggcctcagtttcctcatctgtagaattgttacaaacacctggacctcagggtggttgtgaggatatttattcagagattaatgcgattaaagcccttaacaaggtcatgcacagagccagggctcaatcagtgctatcaatatcgactggtattatttttatgaactttgttgttattagctgttaagttgagcagactttggttacatttttgttgtatcactttcacttaccagttctgtaatcttaattgaagtactgaatcttaattgaagtactgaatcttaattgaagtactgaattgaagtacttcaatcttaattgaagtactgaaactataagtttcagattctaaattggcagatgggattccaccctgtttggaaaaactcaaactgtgtttttcctctgctctcactccacaataacaatcatcaacacagacacacttctgtgaccaaatgtgatgggggggggtttctcccacacacccagcagccaatcagttctgcaccgtacatcagctaggtgtcctccaattccatcctgacactatctacctggacatatcagcagagggctcagtcccacaaaattgccaccaccttcccaccagtcacaagtctgggcctccagagcttcttatgactggcttcacattgaggtttccatgactccctgtttgggttggattagtttgctcaaacagctctcaggactcagggaaacacatacttaggcttaccggtttgtaataaaggactttacaaaggatgcagatgaagagatgcacagagcatggcatgtgggaaggggtgtggagcttccatgccctccccagatgcaccacactccagaaacttccatgggttcagctcttcaaacccagtccttttggggttcatgacatagatatgattgatttaatcattggccattaattgattcaatcattggccattaattgattcattggtcattggtgattaattcaaactccaggtccctccccagggattaggggtgaggctgaaagtcccaaccctctaatcctacctgggtcagtgaccagcctcattctgaagttgcctaggggctgccagtcatcagtcaattattagcttgaaaaagacatcactttgaagattctaaggactttagagtcacataccagaaaatgggtgtattagtctgttgggagcaagccccccaaaatctggccataaactggccccaaaactggtcataaacaaaatctctgcagcactgtaacatgttcataatggccctaatgcccaagctggaaggttatgggtttacaggaatgagggcaaggaatacctgtcccacccagggtggaaaaccgcttaaaggcgttcttaagccacaaacaatagcatgagcaatctgcatcttaagggcgtgttcctgttgcagttaactagcccaacctattcctttaattcggcccatcccttggtttcccataagggatacttttagttaatttaatatctatagaaacaatgctaatgactggtttgctgttattaaatatgtgggtaaatctctgtttggggctctcagctctgaagcctgtgagaaccctgatttcccacttcacacctctatatttctatgtgtgtctttaattcctctagcactgctgggttaggatctccgcgaccgagctggtcttggctgctgataaagacatacctgagactgggtaatttttttaaaaatgaggtttaattgacttacagttccacatagctggggaggccttgaaatcatggcagaaggcaaaaggcatgtcttacatggcggcaggcaagagggcatgtgtagaggaactcccctttctaaaaccatcagatcttgtgagacttattcactatcatgagaacagcatgggaagaatccacccccatgattcaattacctcccactgggtccttcccccaacacgtggggattattaaaattcaaggtgatatttgggtgaagaagagccaaaccatgtcattccacccgacccctcccaaatctcatgtcctcacatttcaaaactaatcatgccttccaacagttccccaaagtcttaactcattccagcattaacccaaaagtccaagtccaaagtttcatctgagacaaggcaagtcccttccacctataagcctgtaaaatcaaaagcaagcttagttacttcctagatataatgggtgtacaggcactgggtaaatacaaccattccaaatgggagaaactggccaaaacaaaggggctacaggccccatgcaagcccaaaatccagcagggcagccaaatcttaatgctctgaaatgatctcctttgtatccatgtctcacatccaggtcacactgatgcaagagctgaactcccatagccttgggctccacccctgtggctttgcagggtacagccccactcctggctgctttcataggctggcgttgagtgtctgcagcttttctaggtgcatggtgcaagctgttagtggatctaccattctggggtctggaggattgtggtcttcttctcacagctccattaggcagtgccccagtagggactctgtgtcggggttccaaccccacatttcccttcaacacttccctagcagaggttctccatgagggctctgcttctgcagcaaacttccacctggacatccaagcattttcatacatcctctgaaatctaggcgaaggttcccaaacctcaatccttgacttctgtgcacctgcaggctcaacaccacatggaagctgccaaggtttggggcttgcaccctctgaagccatggccccagctgtaccttggccctctttagccatggctggagtggctgggatgcagggcaccaagtctctaggccgcacacagcaggggagccctgggcctggcccaggaaacattttttcctcctaggcctccagtcctgtgatggaaggggcttccaggaaggtctctgacatgccctggagacatttttgccattgtcttggggattaacattttgctcttcattgtttatgcacatttctgcagctggcttgaatttctcctcagaaaatggatttttcttttctattgcatcatcaggctgcaaattttccaaacttttatgctctgcttcccttttaaacataagttccaattccaaaccatacctttgtaaatacataaaactgagtgtttttaacagtacccaagtcacatcttgaacactttgctgcttagaattttttttccaccagttgccctaaatcatttccctcaagttcaaagttctgcagatctctagggcaggggcaaaataccaccaatctcttttctagagtataacaagagtcacctttgttccagttcccaagaagttcctcatctctgtctgagaccacctcagcttggactttattgtccatatcactatcagcgttttaatcaaaaccattcaacaagtctctaggaagtttcaaacttttttcctgtgtcttcttctgagccctccaaactgttccaacctctgcctgttacccagttccaaagtcacttccacattttcaggtatctttatagcagcactccactagctggtaccaatttactgtattagtccattctcacactgctaatgaagacatacctgagacttggtaatgtatgaagaaagaggtttaattgattcacaattccacatggctggagaggtctcacaatcatgatggaaggtgaaaggcatgtcttacatggcagcaggcaagaggacatgtgtagggaagcttccctttatgaaaccatctgatctcctgagacttattcactatcacaagaacaggatggaaaaaacccaccctcatgattcaattacctcccacaaggtccctcccataacacatggggattattacaattcaaggtgagatttgggtggggatacagagcctaaccatatcaatggtgatgaacaccaaatacgtatttcacaatatcacatacccttctccctcaaggcaatgggagggtgagaaaagctgcaggtagattgattcccactgtgccttccatgtggaaggcccctgaaaacagtcaatgaacatcatccctgctcatcagcattgagttggcagcaagggcctgccctttacgactgccatgggatggaaaaaaagaaacagggggaagaggagtgatgtgagaggaaggagggactaaaaaacacaggagcaggatgaggtgcaggcttcctgtgggagaatgtaggagttgatgcatcccagtaattcaagcctaagacacagaaaatggtgcaaccacggagagcaagggagccagctatgaggacagcacaacagaccacactcaggctccatggcatttccttcctccctgaccatgcccctgccctgcaaggcccctcatggttccccctggaacagatttggacctcatcccctttgccttcttctttcagcagatgacaacactctaggcatcctgatcggggtcctggttgggagtcttctggtggctgcacttgtgtgtttcctgctcctccgaaaaactggcaggtaccacagcttttccccattctgctcccatccttcacgctgaccccaggcgagaaggaaggagaccctgtcttgtattcagtgccaggctctccccagcctcccgactccccagggatccttccctctcattccatggcaccttcctcaccagctgctgaccctgggctgcttcctcaacagctttgtcctcagtgaattcagtccaattaaggccatgcccctgagcatggtcctagtttcctagcacagcaaagccacagctgcctggagcaggggggagcggtgctcaatacctggtacctccccctgttcactgaatccatccacccagtgagagggcatctgaggggggatcctgggcatcatcacatagtggagactggaacagcctggacgggctgggtggggtcagcacccctttgactgacatggtaactgcagacactgagctgtgagaagggagaaccggggccccaatatggcatatcctggaatgtcgtttatgtctcttgccaaagggcagagacagaagacaagatcattgtcccatttcagcatctccagccctgagtggagtgtctggtcacagcagggacactgagttccaggagaatccaagatgcatgcagtcccctcagtgtcctgcacatgtgcctggccctgctttccccctggtgccttgacccttcctctcaggcaacccctggtggtctgattccttccctgggtcctcagtccctttcctgtgtcactggatcaatgttctcctggcccagcatctgcctgagagtccttcccctctggccaggacagatgtggctttgtaaggcctttcctcaactcccctcacctgggcccctcctaccacagaactccataaagaaaggaggtctccatacccctcttggaaataggctcctttcctggtcccctattttaactccaatttgtgacttttaaccttgcaccttcacaaataaccctgacctttcctagggccagcgatcagagtgacttcagggagcagcagcccccagcctccacccccggtgagtgtcccttcagtctgggtgtggctgggaactactaagccagccccaagttgtccactcctgccagttacacccaggggcctctgaccctatccctggggctgcaaagaggatcccataaaacatcacacaggaaaccccaactggccgggtcagccctaacctccgggctctgggtcatgggtcacttcctcaacctcacttgcttacttgacccctaaaataacctgagaaaggctccctctccccaattctctaagaactgaggacccccacacactcttgcaggaggggcccagctatcctaacactctcgtgctcacttttgtctctgtccccaggccatggaccctctgacagctccatctcctaggtaagactgtccgttcccaatcccatttccactggggccccagctgtgcaggctcagggcagggggactgtcaatccccagcacaaacccaccctacccagaatgacttggataaggttagacctgccctggccatgagctgggcctctgttcagggccaggatcatccactccctgtgctaaccccaccctgggaccctccatcacctgaggagagccctggaattcctacacagcaggaatccttccctgtcccctgacacccctctctcccctgcccagattcccctacccagcaccagggcagctgctctcatctatgaggtgagtgggggccacagatattctggtcccttgggccccagggagacccaggatctgtccccactggcatctggctgagctgaagttcaggaaactgcagtgaaaataacaggaggtggtgagcagaggagggaggggcctgggagcaggaaccccctgagcacagccaggttcagtcccagagtagccctgggtgggcccagagagagatgccagaccctgttctgagaaggcctcaggggtcaagacctcttctctgtttttacaggaattgctacactctgacacaaacatttactgctggatcgaccacaaagcagatgtggcttcttaggttcctctgggagctgctcctgtgggttgatggagcgtccctgaagcccccagccctggggatggggaaggacatggagcctgagccagagaaccagctctgagtcctgaggagacacaggcctggggacaggaagggatgggggtccctgctgaatatatagagacctcaacagactgccccgggctctgggtgggccaaggcgaaggcttcccatcaccacaggaagtgggggcttgcagggaaagtgaatgggcctatggcccacccggggtcacctggaaaggatctgaataaaggggaaacttcctctcattggctctttttctgctcatgggaacttagcagaaactcacctgaaactccatgtccattctctcctgggtcacacaggaaaaatatctccaccttatctcaaccccagtctctcttccctggaaagacaggagtagggggttaggagtcaggctggggtggaccctacacaggaaagggcaggattcgcaggagtcctgcccagccagctgagtgctcagctgtcctcacactaccctagagaccaaggccatgcacagccccagcctgggtccctctgtgaatgcatgagatgtctcaggagtgcaaaagttggggccatctgatgtccacacaaaggtgagcaatgcaggagcatccatgggtggtacagatcgtgggtgtgacctccacacagcctccagtgtcctgagccctcctgctctcttcacccaggccctggaggccgtatctatcactgtcccccagcaatgagcttgcctgtccccaaatccaggatcctggatgcttagctctggccaccaggttctcctctgtcccaatggccactgctcaggagatctttatccccgtgggacacagagaggggttgtcagagtaaccaaggtgggaacagaccaagaattcagtccttgagcaaggtcctcccaggcactacccaggactctagcccctcatttcccatcagttcccaatttaccccctggcgtggatctcactgagcaagcctcctctccacacaggagcgtccaggtcagaggagcagggttccccaacctaaagctcgtgcaggctcccatggcgatgggacaacctgtctgcccctctacctggacccacaggcccctccagccctgcctcacctgcagctcctccacacacctgggccagctgttctcagcccttccctgagggccctggggagagtaacgatctcatgtaggttcacttggaccaggtgctaccttcccacaaacaagccggtccctccactaaagcacagagccgtggtttccaagggtgttctgccattgtccagggttgttggccatgagataggaagtaggaaaagcaacctgcaatatttacatcaggatttagctgtaaatgaccctggatcccacctgcacacaaggtgactcctctgtaggttcctgttgaggctgtgacaaattcccacaagctaagtgacacagaaacttgaaccaaggtgcccacatggctgcgttctttctggaggctccagggcagagtgcgtttcctctccttttccacctcctagaggcctcctgcatccttggctgtgtcctctttctccatcttcaaagccagcagtgcagcatcttgacaccgctctgtcttctgcatctatccccacatctcctcctccttctctgactctcccacctccctctctcatttgtaaggaagggattctgtgattatgttggacccatctggataaactacaataatcttccaaactcataatccttcatttaatctgtaaggtctcttaccatgtgacagattcacagatgctgggggtgatgatgtgacatttttgaaaagcccctgttctgtccatcacccctttcaagaccattttctcatccttgctcactacaaactgcacatgggctcctggacaaggccatcctgactgtggtgtcagtttctgcaataatgtctacagcagcttcagggttatgggagagcaagacagaagtcacttcaagatcctgaacacctctccaccttctcattgttaatgatgctctgttgttaaaagtgaaaggagagcagaggtaactagaagattctacatcacactctgttccatagctcttggtcgtcagcaccacggacagtgtctcaggaatgttcattctgaggtgctgcagcaggaaggtggcagatgagaacagactgctggaaagatgtccatgtctagtttacaagaaaaagacacaaccaggaacaacgttattgcagggaaacttgatctgctctattttatatatcgcaaaatttttgcatgcatctggatgttggggttcttggcacatctattgccataccctgcagagctgagtgctgcacccagggtgtggtctctgggaggctgagagcctgctttggccacatggtaagtctccctgaccctgacaatcaggccattttctctgcctacagaaggtgggaacttttcatggttaatttttgacccccgtgcctgaccctggaaccacacacatcacgctgcctggagcatgccctgagcacagcatcctgctcctccagccccagctgagcccctgagaagctgagctgaccaagcccatgggcttctgtaccagatcctccaagccaagccttgtcacccccatcttgctaattcctgcccacgtcacacccacagagaagactctggtcctacagaccagcgctgcccttacagagactcaggtccagcctatccagtgtccctgctgggcacacacagcactcaggatgcccaatttaagggtcatctgtgggctcgggggtggggaggtcctgtaacttgcatgggtcagagccctcctcacatcctacatttcagcagtcaccagggtcctctctgccctgtcctcaccttcaatgtctcaatgactcactcaatgtcctgggtcatccttgtcatctctcctggacatagccacagctcctgacaggaggggttgaggctctgtctctccatcagtccctcccactctgaccacatgaacctggtcagccccatctgagcctcatcccctcaccaggggccctgtgctctggatccctggatacctgggtccttgtcatgcaaacttgacaacagtaataaccaccaggccctggcatcctcacgcaaagcacatgtctaatgagagacaactggctccacacaccttgaggcttcactgctcaggggcatcctcatccctctcctcccacccctagagatggtaagcaccaccagccccttcccccagaccacagcctcagatctattctgaccctctatacagagaggctctagggaacagcaggcactatgaaatcccaccgacccaggtgccacccgcggcctcacccctcctcatatctatgatggggacagacacacataacacacctctgctcactgcccagtccccaaggtcaatcgcagtctgcttctcccctagatccactgctccccatgtcttccctccccagctgcagcctgggtggactccctgcttttctcagtccatgaaggcaggttccaacctttgtgttgttgcctgcaatgccctcccttctcttcccttccctatgagcgcacacctgcccatccccctaccttctggccaaagtcatcagccacctgctcccctcagtcttccccaaccctgcccatggaggtgacggttcctcctagaacacccaccactcactcttggctttgggtggtaatcacaggttctgcaggggtcacctgtgctcaggtgtgtcacctgtggaaccaaaacttctgagcagagggagctgctcaggacatcttaggggccctgacctctggtctaccacaggaactcaatgcgatcttggtgggactgtggtttagtccctatagcaaccttgacctcatcatgtttaatgtgcacatgctccgaccagtatcccacttctaagagcctccctgagctgtgagctctgtgaaggcaagactgtgcctgtcctctctctgctgaagacagtgaccagcccacagcctggcacaggatgcttcataaacatgcgttgactgaatgagctcctggatcaatactccacatggggaaaagacatgtgtatgaaacactgcagaatgtctcgtcattatgaaaactgggaaacagcccagtaacttaaaaaaaagattgagatgaaggtcacagaaaataccatatgtttaggaaacaaataatagcaattcgggtccactgaatcagggcagccctgactagtgttctgtaagacaagcacaggagagggttttctttacaggtaatttccacaaaaagttgttttcagaagcagctcattggctgagaaggaatcctaaatcacaagtccattccattctatgtgcttagttaattttagggttctcctagttgagatgttgaaggctggtgaatactgacttcagctgtttatccaaatctattggaacattctgtggtttgagctcttgctggtgaaagtgcaattgtcttgcaatctcctgactccactttagaaagctttagcctttgttacttcattttctgtcacaagattccaacccaggaacaggggtgtggacaaagcattgagtgtagccatgcaatgagaaaaaggggagccaataacaaacacaagataaaatccatatgtattgatataagaggtgcccaccacacatgattcagtagaacagaatggtctgggcaggtgtggtggctcatgcctgtaatcccagcattttgggaggccaaggagggtggatcatgaggtcaggagttcgagaccagcctgaccaacatggtgaaaccctgtctttactaaaaatacaaaaattagccaggtgtggtggtgtgcacctgtaatcccagaaactcaggaggctgaggcaggagaatcacttgaacccaggaggcagaggttgcagtgagccgagatcacaccattgcactccagcctgggcaacagagcaagaatccatctcaaaaaaaaaaaaaaaaaaaagaatggtcttcagcaataatataattcaatgggtattttggcgtaaaacgacaagtgagataaacagagtattattaaagagagattcacaccaactgcaaacagtggtaacatcctggaaatttaattggggaaggggtggggtcaaggataagacaccttattttacgcatgattagattcctgggatttacaataaatatgatgacttacatcatttttaaagtaacagaagaaaccatttgaaaagactcaggaggtgtgtaaggtcctttgggtctagagcccaggcctccctctatcccccacacttctgcgtctctatcccccacactctgagatggccctttgaagtctccccatctcacccctcagagacagaggcatggagatccctagggggagggaccttgctgcagctcccaaagctgggggcagggggcagagtgaggttctgtccagcccaacatgcactgagtgggcacctactgtgcgctccttctggccagtgggatggtccctggcctgcagagtttcaccactcagtggatgctgggaatgggacaaaaaagaccaaaccaccctgtaggtccagggatggctggcctccctcagcagggcccacagccccccatggttcaccctcaccaaggtcacctcaacccacctcctcctcaccctccaagctctgcacacgaactctgtcacctcttccctgcagccaggtggccgcccacctgaggccactccctctgcaggcagctcctgcccccacaccccctccttcccagggctcagtcaaaagggcatctcccaaggcacagcaactcagcccgtcacaggctctggtgtccccagtgctgtcccctcacagcccttctctcattatcattaactcctcaatcgcatgaagttcactgagtgcctgtttccctgtcacatgaggtcaggagttctatacaagcctggacaatatggtgaaatcccgtttctactaaaaatacaaaaattagctgggtgtggtggcatgcacctgtagtcccaggtactcaggaggctgaggcagaagaattgcttgaacccaggaggcagaggttagtgagccgagatcgtgccactacactccagcctgggcaacagagcgagactccacctcaaaaaaaaaaaatccaattccaaacactaataaaaaatatggactttggcatgaacccatggtaggggaatggggagaccaaaaatcccctgactgggaaagtgataggctagtacactgctgtccaataaaaagaaaacccaggacaccctcactgttttgtgttgatcttttttcttaggtctcatcataaccgttttatgaatgtgggagctccaaagttaggtgcatatatatttaggattgtaatatcttcttgtttgattgatccttttatcattatatagttgccttatttgtctttttcttactgttgttgcttaaagtctgttttatatgatataaggatagctattccttctcacttatggtttccatttgcatggaatatcttttatcatctctttaccttgagtctataagaatccttacatgttaagtgagtctcttgaagacagctgatatttggtttgtgattttttatttatcttgccaatctgtgtcttttaagtggagtgttaggtcatttacattcaatgttaatatttgttccagtcatcatgttgatcgttatctactttgttttcttattgtgttattgttttataggccatttgaattttttggtttcaagaggttctattctgttctatttaaatcttttgttttgtgatttagaagtccctttaacattccatgtaggatggtctagccgtgacaaatcctgaagcatttgcttgcctgaaaaagactgtatttctctctttcattttgaaatataatttcactctacacaagattcttggctgagagctattctgtttaagaagccaaaagattaggaccccaataccttctggtttgtaaggtttctgatgagaaatctggtgttagactgataggttttcctttataagttaattgatgcttttgtctcactgctcttagaattcttgccttcacattgactttagataacctatgactatatgacttggttatatcctttttggcagtgaatctcctggatcacttgagcccaggagttcaagaccagccctgggtaagatggcaaaaccccatctctactaaaaatacaaaaaattagcctggcctggtggcacacgcctttagtcctagctacttggaaggctaatgtgggagaatcatctgagcccaggaagttgaggctgcagtgagccatgactgtgccacttcactccagcatgggtgatgagagtaagagcctgtctcaaaaaaaaactagctagcattttagaaaatttttcatttatattctgattgttttttacatttctttatgttggttttcacccttctcttgtatctctttgagtagcttaataatcaaaccttgtaggcatgcattattcttttaattcttttttcttttgtctctctgactctgagttttcatatattatctcttcaagctcacaaattctttcttctgcttgatcaattctgctgttgaaagatttagtgcattcttcggtttgtcaattgaatttttcagctacagaatttctgcctgatttttaaaaattatttcagtctattaaatttatctgataggattctgaattccttctctgtgttaccttgaatttcactgaacctcttcaaatagctatttttatatgctagttttgaagagggtctcagggatgagagtgggtttgtgtgttattttatttacccctctcaaccgccatctaagtttatttcagaggaggatgcttatcctcagaaagatgaatcaacttgccaatgttggtggtggatctgggattagaagttacatgagtctaacatcagaggccatgccatcatcactaccactgagagagaagtgaacacagtttgttagggagcaggaaggagcaaggagggctatggcagcaagagacaattttaaaacagggaagttaggtaaggttactaaagagataccatatgttataaagccatgaacactagacagagatattcgaacttgatcttgtgattacaaaagagccactgaagattttaagtaagggcaaaactattcgaagtcacagcatgagccaagaccaaagagggtagtgaaattggggctctggattcctaaactaaagagatgctgccacaactgtcgttcacaacagtgaacaaaccgtgtgatgtgtggagtgagaactggacaaaggctgaagccctgggtttaaatgcaagaagtcaggcacttagggaatggctttgttaggcaagctgtatatgctctctctggaccttggtttgttttcatccataaattagatgcagtgagaattaacctctaaatgatcttcgagccttgctactcaaagtgtggtccgccaaccagcagcaatggcatcatccaaaagctccttagacatgcacaatctcaggcctcaccagaaaaatcagaatctgtattgaataaaaagatctgtgtgggatctgtgaacacattaaggtttgcgaaacacttctctccattgtcttccatttctaaaaggcaattattccatgctcacctccactctgttacttcacaggagaaacaagaaaaaaaaaattatctgttcacctcattagtgcccttttcttagtcatgacatcctcttagactggctcagttccaggaagaggttttagaaaataccagagaggcagtgctgccaccctgtgaccatcgtcagtaaatgcgcttaactctgaccagtgtcaacagcaaaggagagggactgcagatggaggtgaagtccaagtcgcagactagatgagagaatcacagccacccacaattacttaaacagagggacctcaacctgcatcatagagcaatgtcctattgcaaaggacagtttttataatacttaatatgtggtattagtaagaaacctggttccaagccaagctctgcccttgtaaccataaaagtgaccctgacaggtattttcagacacccagccctggcctgaactctgccagtaaacatgtaatttcccaaaagaccttatgttactgtgacagttcttttccatcctgagccaaaatatacctgatacacactcaccaatccctgtcctactccccataagctgaaataagcctaacaccttttcatacaacctaccttcaaatattggttaaaaaaaaccatgtgccgcccaccccaccttcccttggccatttcccacatggggtcacctgaagccccacaccctctgatcactttcccatggggaagcaaagtgcagcaaccacagcaggcactgtgaaacctaggggtgtcccccagggcagcagagccacaggacccccatccccatcctggcacctcacccctatctagaatccgaacaccacatcagctgatctggggacgctgacttttcctgcttctgctgctgctcagtcatcccacacctgtgcagatgtctactttttattccattttattttgtaagaaatatttatcagagcctgctgtgtactgtcactggagagacaaagatgaatcacacctggtccctgcctcgcagaactccaggctgtagagggaacacactcaaagccagactattaccgttcagtgagaaacaccgtgacagacatcagcacagggttttctgatgcatgttaccagtgctttgtgaaaaatcttccactcttggttttctgcacttagttttcctcatttcaagctctaagtgaaaaagagaatacaaatatccccaatggtcctttgtgcggtcacagctggacccggcatgtcctcttggctaatccagggtgttcagggctcccacttcactctgagtgtcctctctcctattggagctcaccattgtcagcacctgcagcagaaaatctagcaagtcaggaaacttgctttactcctgtaactttaaggctagtgaccttgtgacagtgaactaatcctataaatccttttcactttaatttccacatctgtaaagtggggcaggtggattcagtcaccctagagacagcagcacacctgatcttctcagcatccaccatctagcaaatatcaggcacacattaggcactcaaagcctcactgaatgtatgtgtgaataaatgactataatagagccatgtggatcgtggacactatcaacacatatctttgaatgtctatgaagtacacttgagaatggggaaagcaaataattgaggcaggacagtgttttcttcttccttccccttacctccttcctgaagagagcctttgtacctcggagagactctgttgccaggtttctctactgtaagttactatttgtcccattataatcaataagtatctcctgaagtgatactttgggaatatggaagtagcctgtttcttctcaacatacttttttttcccccttggtactcactagttgtagcatcatcatacttttacccattcatatttaaagtccattgataattcttgcctacaaacaattgactgtgctgttagccaaatagtgattttctatttgatcattccttctacattcattaattggaatcctgctgtaagaaaaagctgtttcttcatccttatatatttatgtattcaattatttatttatattagtaggaactcatgggtatttatgggttggaatttattactatcattatttcttatagtgctcattttgtctcaaaattggtcattcaaagctccttctggttggcatctgtgacctttcgacagatctccattatttttcagccggctccttactttctggcctcacgagatgctccaggctccgcttgtgctttccggccccagccctggaatcagttatttctcccaggaagccctggttcctttcatgggagaatgatgtttacgaccacgagcactactacacccattgctgtaatagtaagtgccggtgccttcacgccctctagtggtcagtcctgggaaatacacactcacacttgtgtactgttacccatattctacaaattaggtaaatgaggcacagaaaagttaggcgacttgaccaacatcacgagaaaataggtagtgaaactgcgagacagatacacaagtcctaataagtggaagtagcttcttcacacatgcacatcagcagaaagccacaagcccaatattccagcgtagacactctcttgggaaaaaatccagaattccaaagtattaaccctaatgacaaccatcatgtactgactacctgcctgggcactgggctcccacagtaacacatttattcctaaatatatgtaaatatataaaactaataactttatcttaaataaatatccattttatatattattatataaaatttattatagaaaactttatataattatataaaatatataggccaggcatggtggctcatgcctgtaatcccagcactttgggaggccgaggcagcatatcacctgaagtcaggtgtttgagaccagcctggccaacatggcgaaaccccatctctactaaaaaagtacaaaaattagctgggcgtggcggcaggcgcctgtaatcccagctactcgggaggctgaggtaggagaatcgtttgaacccagaaggcggaggctgcagtgagctgagatcgtgccactgcactccagcctgggagacagagccagactccatctcaaaaaagaaaaactattatatatacatttatatatataatttattatataaaaatgtattgtatataaatttatattaaatacaatttaatatgatgattaaaagttatatgtttattttaatacatgttagaagaaaatttaagcatatctcaaacctgtaattttatggataatattgcataggacaaagatgttttgtctcaaattcccgtcctcaagcaatccacccacctcaacctctcaagcagctgagatcacagacgtgagcccctgcaccctactaggacaaggatgttttgtaaagtaaatttatttaggaaaaagcataaagcaaataataataacagtggtacaagctgtagagaaaaatcataaaatgtctacaaatgtctgaggtttgcattttagttactcctaggaaattagggtcacatagcactgcagaaaaaaacaactgaaaatcgtagacctgggctttagctctagatttgtccatttctaggaccccactccctggacatctctgtgacctccctgctgggagtaaatccaaccttcccagacattagaaaacatgaggaaaaccttgcatacccagaggggtttctgtgtcatagagaaaataacactgagtttgggggtcccagggactctctgtgaggtgctgacagagccaatccctagacacagcagaggtcacttatggggagcacaggtcatcctgttaagggatgggggtcccaataagccttgcttctcacagcgtggtctaaggaactgaaatgtagattggagaaaaagaggaaaagaagacaaggaggcaggactgagaggggaggaggcggaaaggctacctgtgcagatcctcattgccacttacctttccccgcccccacccctggccctgggaagtgcttctgccctgggaggaggcttagcacagagagaggaaggacagcagagctgacagtcacagtagctctgacaagagcatttaatttatattaaatacaatttaatataactattaaaagttatatgtttattttaatgcatgttagaagaaaatttaagcatatctcaaacctgtaattttatggataatattgcataggacaaagatgttggcatctgtgacctttcgacacatccccattatttctcagcctgttccttactttctggcctccttattttctgaagcccaagctcctctccacagaggaggacaaagcagacagcagagcccatggggcctccctcagcccctcctcacagagtgcacatccctggcaggcgcttctgctcacaggtgaggggagggctccctgggagtggatgggaggagggagcacagagactggctggggtttcttggagagaacggggacctgagagggacagagggcttctgttggacactaaacaggaagaagggattacaacaggaaaatctaaataatctgaggttgttagtgaagaaacaatctcgattgttaatgttttccaagtgaatcatcactgagcagttaatgttgaaaacagatgacaataatcacaatttaagttggggtaatactcaagaaaaaaaacaagggacactaaacagagctctgtggcagcactcctcatataggggcaccagctgtgggggacgggtgaatagtgtacactgacacacacatattttgctttgccagtccagctgagtctgtcagggccgcttacagactccctgctgagtcctataaacagttgtgaccatggccttgatcagctagtgagactcatatttattcagtaagattaattaacaaaggcttgagtcaacaccgttagagggtaattgacattgtggacttcccaagtagaaagcaattaagcacctgtggcacatcaatggttagtcttaagatcacatgagtaaacaagctggctagacaaactactctgccttcctttgttactactttaatttgtttaactaaaggtaaagggaccaccttcagtcagatctattaccaaagttatgcaaagtttttggtcttccaagaagatttgtgtctatctctataactatctctaatatttttcccaccagcctgattgaactccaacagagctcttagccaacaacctcagccattggaaaataaatcccacgttgtgaagggccctgggaacactcatgagctcatccacaggagtccgcagcctgtcccaggcactggggtgcaaccaagatcacacaagtccctgttctcacagagctcatgctctcatagggaggaagacagacatgcaagggtatctagaatgtgaggtcaagtattgacaagagccctggagggaacacagcagcgaaatgtcagaaagggaagacccagggtctctagaggtgtcagggaaggggtctcccaaggatgccctaatgtgagcaggacctgaaggcagtagggagggagccaggcagacccctggggaaaaggactccaaacagggaaatgccaaggtcagaggcactgaaggaagggaggtcatgctgctgaccttggcccagtaggacacgcacgcgcgcgcgcgcgcgcacacacacacacacacacacacacacacacacacacacactccaaggctgagggatgaagagacctgtccaggacctagggccccatctttccacctcaatgcatagggcccagtattaactgatgctctctccccactcctagcctcacttttaactttctggaacttgcctaccactgcccaagtcactgttgaagctgcagaaggcaaggagattcttccactcacccacaatctgccttaggcttggctacaactggtacaaaggggaattacaggatatgtactaggaactcaagtaattaccccaggacctgccacagaggctgagagacaatataccccaatacatgtctgctgatacagaatgtcaccaacaatgacacaggatcctacaccctacaagtcataaaaacagatcttgtgaatgaagaagtaactggccagtttcacgtacacagtgatgtctcatgagctctgggtgttgggggtcagttctgcttcacacacacaggattttcaggcctgggctgtgcctgtgtccccctctacattacatcccatttgggggtttggacatttagtgcaagacacacacaggggagacaaacttccacagatcagaatttctttcctgcatccagaccctgcaggcacttgctacagaggaaggacagtctgatggggttggggggaggctcagtaaggggaggtcagtgtcagttccccctcctgggtcccctccccatggacgttccttgtaggaccatgtcagatcctggagtgaggggacccctgggaagcccctgttcagaaactcagccctggaaacccctgtccagtcccctgtcccaggatcctgactccatgtgaccctgggaagcctgtgccggggctgggttgaggcatcttgggcagggctgactgggaacaaggatttaccagctgtccaagggccatggctcttgcagctggtagccagccagggctcagcccccagagcctcatctgggcaagggcaaagcctcgtccttcacatgagacttggtatggagaagacaggtaagctccctaggacattagccgactgccctggggaacttaggagactccaagggaaggtcagcatccccaggggaggaatagagaagagaggatgttcccagcagctcattgtccaccagagatcaggcccagggaacactctgttggaggcaaataatcagagacggtgtattcaggcggttccttggtaccaacctttaggtcaggtgatcgtgaatattttaaaagtaattcacagacaacatggcaagccactgaccatttatcattgttggcagaaaaatcggagatctgtacgtttggaaaggagactttatttcatatatttttcattttatttttctatttttatttttttttagagaccggttcttgctctgtctcccaggtttgagtgaagtggctactcacaggtgggaccataattcactgcagcctcaatcccccgagctcaagcactcctcacacctcagtctcgagtagctggaactataggcatgcaccactgcacccagatagtttttaaaacaaacttttatcttaggttcaaagatacgcatgcaggtttgttatatatgtaatcaggggtttggtatacagattatttcatgatccaagtactaagcataatagccaataggtattttttctgatcctcactctcctccctaaaatttttttaagagacaggatcttgctatgctgcccaggctagtctctggctcctgagctcaaactattctaccacttcaacctcccaaaccactgggattacaggtgtgagccactgcacccaaccaggttatttcttacacagggttacagcctgcaggctggccattccccagggtagaagatgcagcctccagcagagaccaatagcaggcacttcaagggaggggaatgtggaagatagatttatgctgaatgagttggccaggtatacatattcaacaggttataggtggagctatggatactcacaaaggaagtacacgcacatgcgtgatcaacaaacatgcatgctacatgcaccccatgttcactttggggtggagaattcagatttaaatgtattaagttaggtcttatacatcaaaagatgaaacaagcattatggtactcagtgcaccgtgtctgtataccagcagaaccaggccatgctcagtggtctcttattaggagaaagttactgaaatcagtctcctgtccaattgaagtgtagttgtggctgttggaacaggggtcagttagccagtgttggtggatgagccgcgatcatttcaatattgcttatctcgaaggctagtgttactttagccgctagagagaaagaaaattctgtgttagaacatagcttattctttaaatgtaggaaagtgtggcttagcccttgcctgcatgaccttaggttgagtttataatttggtatcttatggccacagagagtctgttctgtcagtctcatgatctcgattttagcgttaatgctagtcagttgtcacctctaaacttccaaagggaggggctgtaatgaggtgtaacctcccatcctgtcatgatcaggaactctgggatccgcttggccaagaggccatcctttcagttcactggggaattagaattttatttttagttctcattgtgtgtcctattttactgaggggaaactgaggcatatgaagatacagccactggccagggtacacagactacagatggcagagtcactcgaggtcactccctccctccttcatgagagaactactgagcgagtgtgtgtctcatattgggccctgtcttgtgcagggtgtgagtggggagagaaagcaaagttctctcctttatcctctcataggagtgacaccaacacatcgggaaacacaggatttcaggtccagtgaagtgggtatagatctaagagaggaggcctggacattcccaacatggatctgatggttgaggcaggtgatagcgttctaagtaaaatctgattaattcttcatttgttcctcactccccagaccactgaggcgtggtattctccccaccgagctgtgaaaccctaagaagaagggagctgaaccagtgattgtgaaacagcatcattcatctggggtaatactcgaggttcattgtcccatggccatggaaaactaggatgcaggcacccagagtgaagttaagagtggaagtttcataggggaaagaaagagaagagctctctgcacagagagaggggtcctggggaaaatgggttgccacttccatagtgaaatgcagaaggttttatagatgagcttcaggaggcagtgtctgatttatacagggggtgaaagattgtttagaccagctgtgccatttgctggctgccccactctgatcttttgtcatgcagatggattgtctacctggccggtgccatgttgcctggttttttactgtacatgtggtaatggagaaaagggaggatggagtctccatgttgaacatacctggcttccaggcagcccttttctattggcacacctactggaattcacctgtgcaagcttccatcttgctcatctacatctgtagctcaatttttcaggctgctctttgttagaaaaggaattatcttgggctgctttttgttaaaggggaaaccttgccaaggacgctcttaccctcactaacttcctaaataatttctttctagctcctgtgtcagttggtctggggtccacagataccttaaggacccagggatggaggagaagacgtgccctcagcccactttcagttgagcacctccactgattgtccacagggtcagtggctccgaccccatctgagtcagcaacaccagagtcacagaagaaaaggatgttgtgatcctgacctgccccacagatgactctggaaccttatccagtggatcttccatgaccagcgtctgtgactcatggagagaatggagctgtcccagggccactgtatgctcagcataaaccccatcaggagagaggatgctggggagtatcagtgtgaggcctccacccaggtcagctccaggaaaaatgaccctctcagactgactgtgaaacaggaaacatctgagtcccctcttagaagttattaaaccctaaatcaaatattctttgtttggaggcattttattataaaaacttgatattcatatacataaactaatatgaagttaaaaattcattatacacctactgtttttagcttgatcttgcagtaaatctttagcttcattgattgtggctactatataaggagaccctcttttgtctgcgtgatttaagagcataacatgttaatgagcatctcttatttttttctttattggcagtagggcttaccctactattactagtgttcattcattatctagtattaatgctgcttcccgttttgtcattttgggttcatatccacctctgtagtaataatctctgaaggcagattttggtagactttgaaacacttgttctacttgaggttttatgtgcttcatggcttcgcaaaatgtaacagcttgcaaatcctgcagcagcggtcagttcagctgctaccactgcacaggccatggctccagcttggctcccctgccaccaccaggagggtggatcatcccagcccagaggccgcacccaccacctacttggctttaccagagagcaatgcagcagccaccacagtagtcacaaactgcccaagcacctttttcctctttaaagtggtggtgatgatgcatttactttatcgagctattgtgaatagtcaatgaaatcaggtgacttgcattgaatcaataaaaatgaaacaccttggaatgacattgtcattgttggcttaaggtcccattcagtaccagattttactgtttgttactgtcagttgcaccatctccacagtggtggcaacacatgtccctcagaggatggaccatgattgtgtgtgagggtgggaacacatgatcagctctcaggagtcaacagctccgtccctcctccagcaggaggtgtggatggtgcctgcactctgacatgggcaaagagaatcaacgggagggtgccatgcagagaggacaccccaaatgaaatgcacttcacacaatgcatctgcccatgtggtcctggccaggactggggagggaagggcttggagatcccagatttcaagctgaagccctgagacaaggtgcaaccgctgagagaaggagcactctgtggagagattcccacccacatctacagtctccaccccatcttatcccataaggctggcatatccctgaagggcagtgtgaagaagggacaagagtcttctctagggaggacactctgggccaagaccaaatgaaagctgggcactggcaaggacaagatttcttccaccatgagatttcaccattgtcctgaagcaatgaacccaggccctcttgctcatgtgaaacaccgcccggcctgaatcatgctaagggtgaacccaaggccctggacaccaccaccctccaggcctgtaccagcccctgcaggactcattcacctgaaccagcatcctccagtcctcaggctaaagggagaggtctttacctctttaagctacaggagattcccagatacccgtatgtccctggagagagagtccacaggttgtccacttggacctggcatagatcttcctctcaaacgccccaatgcccaggtgctcttcctcgaagatcttcctctccctacaggctctaggaactgtgagtccctgaactttcattagaaggaagctttcccttcatcctccctgaccctgtgaggggcagctgggcaaagtggacaccaagattaataactccagagggaaccctccctggagcacaacacccagggcctatgggggtgttccctggtggtcctggccagtggtgctgcccttctttctacttccaaaatcccagaccactgctgctctgactatgggctccactccctcaacccattcttttattaaatgccttttctgcacctgctggagtgattatatggtttttgttcttggttctctttaatgtgatggatcacatttattgatttgcatatgttgagccatactggcatccctgggatgaatctcacttaatcatagtgaatgatctcttttgatgtgttgctaaacatggtttgttaatattttattgaggacttttacatctatgtttgttagtgatgttggcctatgttcttttttggctttgttttggttggttgtttttgagagatggagtccccctatgttgtccagactggtcttgaactcctgggcttaagcagttctcccacctcagccttccaaagtgctgtgattacaggcaggagccaccacacccagcttgctttttgtttttgagagagcatcttgctctgttccccaggctggagtacagtgacacaaacatggctcactgcggcctcaacctcctgggctcaattggtcctctcacctcagcctcccgagtagctaggactaaaggcacatgccaccatgcctggctaatttttttctttttttttttttttaagagattggttctgactatgttgcccaggctgatctcaaactcctggcctcaagcaatcctgtagtgtttttttgtttgtttgtttgtttgtttgtttgtttttgtcctgtccttgtctggttttggtatcaggataatgctgaccttgtagaatgagtttgaaagtgttccatcctcttcaattttttaaagcattttgagtagaattggttttagttcttattaaatgtttggtagaattcagcagtgaagtcattcggtcctgggttttccttttgttacagtttcatgttggtttgttgggtttttctgccttttcatgcttccatcttggtaggttgtatgtgtccagaaagttattcatttattgtagttttattccattgtggtcagaacaaatgcttgatgtgatataaacttttttgaatttattctgactggttttgggacttaagatgtggtctgttctgaagaatgttctatgtgctgatgaaaataatgtgaattctgtaacagttagatagttagtgaaatgtcccgtaaatgccagttaggcctatttgatctagtgtgtagtttaactttgaagtttccttgttgattttctgtctgaaagatctggccattgctgagagcagggtgttaaagtcccctaattaatattgtattcagtctatctctccttttagatccactattgtttgctttaaatacttgggagacttgggagctcaagtgttggatgcatagatatttataattggcatctcctcttgctgaactgagcgctttatcattacatagtgactttctttgtctctttttatagtctttgatttgtagtttatcttatatcagtatagctactcctgctctcttttggtttccacttgcatgaaatatctttttccacccccttcactttcagtctatttgtatctttttacatgaagtggtttcttgtaggcagcatataggcagcattcagccactctatgccttttaattggagaatagagtccatttatattcagtgttcaatatttttaagtaagaacttactactgccactttgttgcctgttttctggttgttttgtaactcccctcttcctttcttcattttttactgtcttccttgtggttgattgtctctggtagtatgttttaagtcattgttttttattttcagtggatctatcatagattttttgcgttgcagttaccataagacttccaaaaacatagatataacaaagtatcttcaagagaagaaaaggtaacaacttatcttagatcacaaataaaataatagaaacagaaaaccccccaaaaaaactctactctttaatttcatcctttgcaaattttgactttgtctctatttacatattttatattacctttctccaaacaggtagctatttttttttaagacagagtctccctctgtcacccaggctggagtgcagtagtgcaatctcagctcactgcaacctccacctcctgggttcaagcaattctcctgcctcagcctcccaaatagctgaaacgacaggcatgtgctaccataccctgcaaatttttgtattttttggtagagatggggtttcaccattttgaccaggctggtcttgaactcttgacctcaaggaatctgccaaccttggcctcctaaaatgtattattgtttttgatagatttatattttgagactcatgctagagttatgattggattactttccacaattactatttgagtattctgggtttgtctacgtacttaatttcaccagtggattttataccttcaaatgttgttattgttgttgtggttattttgcatgttagtgttttttttttactttcacattgaagtatttagtatttaccctttagtatttacaggaagactagtctgatggtgtgaattatctcagcttttgtttgtctaggaaactttctctctcctttatattgaaggataacttcactggataaagtattctcaaatgtcaatattttttcagcattttgaaaatgtcatgtcactccctcctggtctgtatgatttccactgaaaatctcttgccacagaattggagcttctttatgccatttgcttcttttctctttctgttttaaaatcttctctttgcccttgacttttgagaattcgattattttatgccttgggggagtcttatttgggttgattctttcctctgatccattctgctgttgagagactctaataaattttcctgttcagcaaatatatttctcaattccaagattcctgtttgttttctttaaattatttcaatcccttcgttaaatttctctgataaatttctgaactgcttttccatgttttcttgaagatcattgagtttccttaaaactgcagttttgaattcttgattagagagctcacacatcaccatctcatcaggatcagtcacttgttcctcactttgtccatgtggggagatcatggttacctgcttactgtttcttgtggatgtaagtccaggtctttacattgaaggattcattatttattttagtctttgtctggcttgttttgatttttattggatagattttcttagagttctttactgctaggtcactacctccttttcatctctaagttacctttagggtttaccttggccctagtaaatgatcagagtgtgcccttcctaactgagggaggtcccaaaggggatatcctggcagtgtgggaaagctggctagatgtccatgcccaggatacctgtgaaacaaacctactacaacatggagctgctgaaacaccagtctgatttcatgtctcccttggctgagttacacagcagagtttccagggaaggagatggtagtcctgcctccccactctttgactgtcctcagggaaatttctcccttcgggcactcacaatgcttcttgtgggttaaggcagggacagggaacccaagattgtgcagaaactggttgcccgcattgatcttacatttcccagtgtagaaaccatgagttggggtaaaattttccacacacctggtaccaggcagaatggggcagggagggacattacagatggggaaatctgattcttttgtcatctgtctggagtttttttcacttctctgtggctctgaaaactgtttcattttcatatttgagttctggaatatatctggtaataattttggtgctgtatatttgtttttggttttctgtgtgaaggagtaaagccagcttgcttctatgccaccattttggaactggaactgagatatacaattttgatgtctactttgtgtctctgtgaggcaacagattcccaggggtttttttgtttgtttgtttgttttttccagatttgacaactgtcaaaattgggctatgaaatggagaagcagtatggataatcaccccattacttactaggtttcatgtaataagttttaatccttaaaggccccatttcaactcacattgggccatattcactatcttaactgaggtttcatgggatcccattttgtcaagccaatgtctaagtaccaaaaacacttctattttatttattgtctcagagcacctatgtccaatagagaatgttttacagcaatgggtatatgactccgggaaatttaggcaaagttacaggtaaattgagacatacctgtttttttcaattttatatttagttttcttctcaagataatagggacagagtgtttaaatttatgggattcccacgtgtggctacaatttgagccccagtattgattaaatccatgaatatttgtcaattagtgtatttagcaaatgtaaagttaaattagatcctatgttgtagagacacaaaagcaaattggtgcccttttaaaaatctttttttacataaattccttaatatataagttaataaatgaattttgaatttccaatagaatcaaagtatgaaattttactttgatttagttacatattatacatacataatttaactatttattatatatttatattaaaatattgtatgtgtatatatttaattaccttttattttttcctcctatatctaggggtttgttgtaaatgaataagtaacctagggctagcattatgtttgctagacctgtggtttgctcagtacttaaagtttaaagtttctcttttatttttcttggatttgtagtcaatcaaagtggtagtttcttttcttggggggtgaggttagccacctaaagctgagattcttgttttctgtctctagaatgataagaggaaaagatggaggaggaaaggtggtcagtgactctagggagtagcctctctctgggatgactccacaacgacgaaacaagcccgtcttttttttttttttttttttttttgagatgaagtctcactctgtcgcccagactggagtacagtggtgcgatcttggctcactgccgtctctgcctcccgggttcaagcgattctccacccaagtagctgggattacaggcacctgccaccatgccctgctaattttttgtatttttagtagaggcgaggtttcaccatgttggtcaggctggtcttgaactcctgacctcagtcgatccacccaccttggcctcccaaagtgctgggattacaggtgtgagccaccgctcccagcccaagcgcatcttttaagcaaaatctttaaaatggcttgtatttctagacggttaatgtctttttctttttcttctttctgtctttggatgtttacttgacaagttcctgatggtacccaaagccccctgttgttttaatcttacaacttgttagcagaataaaattgagggtggcctccatgtgcaccagcctcctaggcagctgtttctctttccaaggtgacccaatcaacccctgaggtgttgattgtgcaaccacagcaagaaatgcagaaacaagggagccactagcccgggattgccccatcacatgaagccacggctgtgtctgcagggattatccatggcccagggcctaaaattcgcatccaccttagtgactacagacactgccggtctaaccaggggcagcctcctgacaagattttactaaatggcactctgctatatccatcaggagaaccacagcttctccacacgttgtcacccatttgctttgctaacagaaatggtatcttgccctggtctccatagctcaccttggctcaaccttgggacagtgaaagaaaaagtcaatacatggcacctccatggggaaaataaatgggaaatgtcactcctcactctaaggaggagtggagttcaccctctgtggatgccttccctattaggattccagaaacacacctagcccttgccctagatggagaatcccccttctcatggggtagaccaccttgggagcacattacaggttcctactcggtaacaatttggggagaacaacatggcagcactctacagcagcaacacagcagcacacagtggagcaactgaattgcactgaacagaacggcctcaccagtgaggcagccacaccggcgaggatgttaaaagcctcagcagctccgagatatcttgtgctaaacagaagaggtagtctattgtgccgactacaccaatttcttaaatttgcgatctttaagatgcagagctcttgccaatgattgcgagagacataagatgaaaataaagatttattacttacaggtcctgggggatacaggccctgtctggaggacacacacacacacacacacacatacacccacacccacacacacacacagaggtcaggggcagtatggggaggacagagggggaacccatgggtcaaggcctttattagggtacagaatattattcaaacagattgtcctcagggagttttaattggtggatttaatgcaagcagacatgagatccaggtaattagaggtggtcactgcagcaggcagggtgtggggtcagtggggcagtcatacgggctgtatccggaagtcccatagggaggaggtcaccaggaggcagttgtataaatcagatatctgatcaatcacactgaggaactggaaggaggtggagaactggaaactatttcaaaggtgactgagccctgcttctggtatgagaaagtccaacttccatccaaaacggatgccaaggcattgtaaaattgtaagcattcacaaatactttcgatgcattcttatttagctgacttctagtttttacagcccaaatatcatcatttttcattcttatttggcaacattctgttaggtgcagcatgtatggagggcacctcctttattaatacatgtggatttgctctaattgtggttttttcattggttccattgcatggctacactatgatcttttacccacacccctgttgctggatttgaggctgctcgtcacttgtcacattgacatgaccttctgcagtgaacatcctcatacacacatctctaccatgtggagtactgttcctggagctcattccttcaacatgtatttatgaagtaccctgtgctgggctattggctggtctctggctttagcagagacagaacaggcaagcttggccttctcagagctcacagcacagggaggccttcagaagtaggatagtggtcagagcgtgtgcgcgttaaacatggtgaggtcaatgttgctgtagggactaaactgcagtcccatcagaagtatatgggaatgtccatctccatgtcctcacctttcttggcataattatttgagtactgcatgtgttcctgtgtcctattctttgcccacacatcatccatatttaccctcttaaccgtccatcctccaccttgtccctaagtgctgttgttaatagccctgtggtagaccagatgccaggagccctgagatatcctaagcagctccctctgccagtccttccaagagttctggttccacaggtgacacacctgaacacaggtaacccctgcaaaatctgtgattaccacgcaaggctgacagtgagtggtgggtgttctaggaggggccaccacctccatatgcagggtcagagaacactgagtggagcaggaggctgatgactttgaccacaaggtaggtggatgggtatgtttggctttatagggaagggaagggaagacaagggaagacgaagggataggggtggggaggggaaggggaggggaagggggaggggaaaagggaaggggaaggggaagggaaagtttgggcattgcaggcaacatcacaaaggttggaacctgcctctggggtacaagaacagcaaggaggccacccaggatgcagctgaggacggaagacatggggagcagtggatctaggggagaagcagactgtgattgaccttgggggctgggcggtgaacagaggtgtgttatgtgtgtctgtcccagtcacagatatgaggaggagtggggccgcaagtggcacctggttcggtgggatttcctaatacctgctgttcatcagagcctctccatgtagcatgtcagtatagatctgaggctgtgtctgggagggggagctggtggtccaaggcagcctgtggtgcttactgtccctaggggtgggaggagagggatgaggacacccctgcgcagtgaagcctcaggtgtgtggagccacaggtatctcacctggtgattcttgtcagacacgtgccttgggtgaggatgtcagggtgagagtcactgtcatttttcttaaaatgtacatggcatggacccaggtattcagggacccagagaacaaggcccctggtgagagagggttgcatggagctgagcagtttcatgtgctcagagtgggagggactcctgaaaagacaaagcctcaatcctacctgtcaggagccatgcctatttccaggagagatgacaagggtgacccaggacagacattgagtgtgaggacaggacagagaggaccctggtggcttctcaggtgtgggaatgtgaggtggggtttgttcccatccaaagcacagaagccctccattgtaccctgagtgctgtgtgtgactagcagggacactggatgggttggacctgtgcctcttgaaggcagggctggatctgtaggaccagagatgcctctgtgggtaagaggtgatgggaatgaggaagatgggggtgactgtgaacctattttagttccctggggatgtgtgctgaagaggaagtggcctagaacattccttttctgggtaaagtgaagcggggaagcagtgtggattctttttgttttgttttgtttttagatggagcctcactctatctcccaggctggagtgcagtggtgcgatctcagctcactgcaacttgtgtctcccaggttcaggcaattctcctgcctcagcctcccgaacagccaggactacaggcatgagccaccaggcccggctaaattttttgtatttttagtagagatggggtttcaccatgttggtcaggctggtctcgaacacctgtcctcaagtgatctgcctgcctcagcctccaaaagtgctgggactacaggcgtgagccactgctctcggccgcggtgtggattcttcagtgtgttctgatagccatgtgtcactacacacttgttctttatgtcttcacatctcatcctgttgcattttaaagcatgttcatagtatgcagttttgcctaataaagcattctcatatatacatacatatagatagatgatagatagatagatagatagatagatagatagatagatagatagatagatagatagatattcagacagatcttcaggccccacttgtccctgaggaggattatttgcctatggaaagaacaagcagatggcaaaggcctctgacaccaagcacaaggctcagcctggaggagctcacagaggagcccaggagatcctctcaagcatctcctcaagggctcagctggggatggaggagcaggatgctgagctcagcggatgctccaggctgagtgatggatgtgcttcaaaggtcaggcacagagaatcagacgttaatcatggaaggttcccaccatgttgtaggcagagacagtggcctgagtgtcaggggcagggagactcaccatgaggccaaagcaggctgtgagccccccaagagaccacatcctggatgcagcaagcagccctgcagggagtggcagcagatgtgctaaaaaccatgatatccagacatgcaaaggtttcgcaatttatggattagagaagaatagcattatccctgtaatagcttcctctttcttacactctttctcatatagaatagaatgggcagcttttcctgcagttccctcctatctgcatgctccctgctgccacctggaaattagcctcactgagtcactgtccgtggtgctgatgtccatgaactattgaagggccggtgagttgtgatctttcagtcacctctgctttctgttattcttagcaactaagcatgtcaccaagaagaaggtggagaggtactaggggcatggagagccctccgtctccctctctcaggatctggagggtgctggggatgttaatgcaggaactgacgccacagtcatgatgaacccatccaggtgcccatgtgtagtttgtagtgaacgatgatgagaagatggccttgagaggagtgatggacagaacaagggcctctcaaagatgtgtacatcctcatccccagatctgtggacatgtcacgtggtaaaggacactttacagattaaaggaaggatcatgagatggggaggttgttgtggtttatcccaggtgcgtccaaaataaccacaaggctccttccttttaagtgagagagggaggtgggaggaggtggagatgtggggatggaagcagggcacagaatagtttcaagatgctgtgctgctggctttgaagatggagaaagaggacacagccaaggttgcaggaggcctctaggaggtggaaaaggagaggaaatgcactcttccctggagcctctagaaagaacacagccatgtgggcactttggttcaggtttctatgtcactaagcttgtggtaatttgtcacagcctcaacagaaaactaaagaggcctcaccttgtctcatctgacgctgtgtgcaggtgggatcaggggtcatttagagctaaatcctgatgcaaatcccgatataaaacaacccattgcgggttgttttcttacctctcatctcaggacgaacaacctgtggcagtggcagaacactcttgggaactgtggctctgtgctttagtgcaggcaccagctcacttgtgggaaggtggcacctggttcaagtgaacctatatgagatcatcacccttccaggggccctcagggaagggctgagaactgctgtcccaggtgtgtggaggagctgcaggcgagatagggctgtgggccagggagaggagcagacaggttgtcccatcgccatgggagcctgcatgagctttagatgggggagtcctgcacctctgacctggatgctcctgtgtaaagagttggcttgctcagtgagatccatgccagggggtaaagtgggaactgatgagcaatgaggggccagagtcctgggtagtgctcaaggactgaattatgcgtctgtattaatcttggttgctctgacagcccctctctgtgccccaccagggataaagatgtcctgagcagtagccactgggacagaggagaacctagtggccaggtataagcacacaggatcctggatttggggacaggtaagttcatttgtggaggacagtgatagactgggcctccagggcctgggtgaagagggcagcaggggtcaggacactggaggctgcgtaggggccacagccgcaacctataccacccatggttgctcccgcattgctcaccttttgtggacatcagatggccccatcttctgtgctcctgagaccccacatgcattcacagagggacccaggctggggctgtgcatggccttggtccctggggtagtgtgaggacagctgagcgctcggctggctgggcagggctcatgtgaatcttgccctttcctgtgtagggcccaccccagcctgactcccaacccctatttctgcctcccagggaagagagactgtggttgagacaaggtggagatattttccctgtgtgacccgggagagaatggacacggagtttcaggtgagtttctgctaagttcccgtgagcagaaaaagagccaatgagaggaagggtcctctttattcagatcctttcctggtgaccccgggtgggccacaggcccattcactttccttgcaagcccccgcttcctgtggtgatgagaggcctttgtcccggcccacccagagcccagggcaacctgtcagggtctccagatattcagcagggactcccatccctccctgtccccaggcctgtgtctcctcaggactcagagctggttctctggctcaggctccatgtccttccccgtccccagggctgggagcttcggggacgctccatcaacccacaagagcagctcccagaggaacctaagagaccacatctgctttgtggtcgatctggcagtaaatgtttgcatcagagtatagcaattcctgtaaaaacagagaagaggcctcaacccctgtagccttctcagaacagtgtctggcatctcccaggctctgggcccacccagggcttctctggggctgaacctggctgtgctcagggggtccctgttcccaggcccctccctcctctgctcaccaccacctgttctcattttcactgcattttcctgaatctgagctcagccaggtgctggtgggggcagatcctgggtcccctggagcctgcgggaccagaacatccatggcccacactcacctcatagatgggagtggctgttctggggctgggtagaggggcctgggcaggggagagaggagatgtcaggggacagggagggagggtcacggaagcccagcctggaaggttcctgtctctgatcggccaggacttacttccctgcctccacttccactcatttcccctcaggattgaccagctctgcccctgagctcagcctcccagtgtggacacaacaccctgacccctgtcctggctgggcccaccccgcacccttgttaatgtgggcctctgactgatggtcccagtgtccactctgcacctgctggactccagggttctcctcaggtgtagagggtcccggggaggggtcagcacatggcgtgggtggtcctggccctgtagagaggcccggatcctggccggaggcactcactttgacctgactgttctggggaaaggtgggtcagtgctgtgctgtggggttgatggtccccctgccctgagcctgcactgttgggaccccagtagaaaagggctggggagggaacaggcttaccgagaaggtggatctgtgagagggaccatggcctggggacagagacaggagtgagcagcagggtgggaggagagcctgggcccctcctgcaggagagtgtaggggtcctcagctcccagagaatcagggagagggagcctcttcccaggggagacctgagcagctgaggtcgaggaggtgacccacgacccagagcccacagatcagtctgaacaagacagtcggggtcccctgtgtcatgtttcctgacatcctccttgcagccccaaagaaagggtcagaggcccccagggggtgactggcaggagtggacaccgtagggcaggcctaggggctcccacacctgggctgaagggacactcaccaggggtggaggctgggggcggctgctccctgaggtcacgctggatgctggccctaggaaaggtcaggattattcatgagggtgcagggagaaatcacaggtttaggggcagaataaaggacaaggaagggactccattttcaaggactggagtgaaggcctcctgtctccatcagtttcgtggtaggagcggccgaggacggggagctgaggataggccttaagcagtcacgtctgtcctggccagagaggaaggacccccccaggcagatgccgggtgaggagaacattgacccagggacccaggaaagggactgaggactcagggagggaatcagaccacctgcgtttgcctgagaggaagggtcaaggccccagagggaaagcagggccggctgtgtgtgcaggacactgggggagctgggggcatggggaggcaaggagcatgtatcatattctcccagaactcagtatccctgccatggccagaccctcctttcaggcctggagatgctgaaatggggcaatggccttgtcctctctctctccaccccttggcaagagacataaaggacagcaggtcctgaggtccaggttctcccatctcacacctcagggacatcaatcacgatggggtgctgaccctacccagcctgtccaggctttgccactccccactgcgtgaccatgcccaggacccccaccatggatctcaagcctgcaaatccctcctcactgggtgggtaaattcaatgaacagcagaaggtaccaggttctgagcactcccgtcttatctccctccctccctccctcccttcctccctccaggcagctgtggctttgctgtgttagggaactaggacagcactcaggggtgcaaccttaactgtgccacattcataaaggaagaggcagcctaggatcagcagctggcaagggaggagccatggaatgagagagaaggattccttgggaggatgcggaaagcctggccctgaatacagggcggggtctccctcctccctgactggggtcagcctaggggtgggaggaggctggggaaaagctgcggtaccttccagtcctggagagaagcagaaaacacaccagggcggccaccagagccaccccaaccaggaccccagtcacgatgccagcgacggcccccacaggaaggcctgggacgttgttttctgcagaaaggggaaggcaaaggggacaaggcccaagtttgttccaagggaaaccataagaggcattgcagggcaggggcatagtcagggaggaaggaaatgctccagagcctgagtgtggtctgttgggctgtcctcatagctgactcccttgctctccacggttgcaccattttctgtgtctcagacttgacacactgggatgtaccaactcctacattctcccacaggtgcttgcacctcgccctgctcctgtacctttaaatcccttcttcctctcatgtcacacctcttccctctgttgcttttttctttttcttttttttttggatggagtcttgctctgtcacccagactggagtgcactgacgcaatctcggctcactgcaacctccatctcccaagttcaagcgattctcttgcctcagcctcccaagtagctgggattacaggtttgtgccaccatgccaggctaatttttatatttttagtagagatgaaatttcgccatgttgtccaggctggtcttgaactcctgacctcagatgatctgcccgcctcggcctcccaaagtgctgggattacaggcatgagccactgcgcccagtcttcctcttgtttcttcttttccattccatgattgtcacagagagcgagccctcactgtcaactccatgctgatgagcggggatgatgttcattgactattttcaggggtcttccatgtgccaggcacagtgggcaccaacctacctacagctcatctcatcctcacatcaccttgagggagaggggcatcaccgccatctgcagagttagaatctgagacttacagtacctcagtaagtcaaggaaggtcacagaactcgtacatgataaaaccaaatttttactgcattgttcctgattttattgccaataacaacatcaaaaaaataagaatactagttgatagcatcagttgagctctcgccctgtgtataactctgctttaatctctttaatctcctaataaacatcctcacaaccactctgagatccaggtgttacagtgagtttgatctctagcatatatatacatatatatagatagatagatagatagatagatagatagatagatagatagatatagtagctgttgttattctttcttagcctgtccatctctctgctcacagcatccgtctgttctgcacattgtctatgctttccattgcagcctttagcatattagccagtattgttttttgtttgtttgttttagagatggaatctcgctctgttgcccaggctggagtgcagtggcacaatctaggctcaccgcaacctccgcttcacaggttcaagcaattctcctgcctcagccttccgagtatctaggattacaggcacccaccaccatgcctgcctaattttttgtatttttagtagagacggggttttgccatgttggccaggctggtatcgaactcctgacctcaggtgatctgcctgcctcggcctcccaaatgctgggattacaggcatgagccaccgctcctggccccagagttgttttaaattcctggtctgataatttcaacatccctgccacatccctgccacatctgcatctggttctgatgcttgttctgtctttcgaactgcatttttttttttttttttttttttgcctctagtctgtcttgtagtttttgttgaaagccaggacatgatgtactgggcaacaggaacttgggtgagcaggcgttcagtgatgcggtggtgagtggggggagggaggggttctgtggtcctggatagagtctgtgccctgggctgtgaatgtcacaagtgcctctcagttttttctctcctttaggtgggacatgatggctagagggggctggagttggatatttcccacccccctcagtcagttaggctcccataaacccccagcaggtgaggctctggtaaaataacgatttattcctgctaactaataactatctgaacttgctaagaagaacagatgctctggcatatttttaaatatttactttttttctactccccagaaaggataggggggattattatgggatattcatagtgagaaccaggtagagctccagggtgtaaggcaaacgtgtgggactacccgcaagcctgatccctcccctgaaaaccttcccacagccctgcagccccagggtcagatgagactcagctcccaggggcagatttaggagaaacgggccagatgaatgagacatgggtcttaggctctagagggacagaaaacaggtgtggccagaacctcctaggatcttgtatccacatctctgtctctgaagaggttatagatcattcctacattcaatccctccctccttcataagagaactacagagtgtgtgtctcacgttgggcccagaacctcctaggatcttgtatccaggtctctgtctctgaagaggttatagatcattccttcattcattccctccctccttcatgagagaactacggagtatgtgtctcacactgggccctggctggtgcagggtgtgaatggggagagaaagcaaagtcctcccctttatcctcctgttggaatgatacccacacatcagaaaacacacgaaaccatttcatgtccagagatgcggggtgtggacctgagcgaggaggcctgaacttccccagcactgactgattgttgaggcaggtgatttagttaagaaaaaactgattaattctgtatttactcataactctccagaccagaatctccccctccgagctgtagacacctaagaagaaaacatccgaaccagtggctgttctgaggtccacagacacctagtaaggcaccagggatgaaggagaggacgtggcagcagctgcagacagccctcatgtgactctgccagctgcgatctgcccaccgtggccggtgtctgtatctctctgtgcctcagtttcccctccatacaatatgtaaatggaaaatggtctgaggcttgccactttgtctgtgaatgaactttaaattattcacaggatctgacatgaagcttggcacagaggaggtgttcacatcaacagcatctgttatttgcctccatgggagagcacccctgggcatgatccccggtggacaagaagctgccaggaacattttctcccctctgttcctacccctgggccactgactgcccaagggcatctcttaagctcctcattcagggggccaatgccctagtaatcctgtccccctgccctctccaggctgagtcccagggaaagtggtaggctctgtccttgtctagatgagactctgggagctgagccctcactgatgagaagcttcaggaaccacagcccgcagacatctggtaaatccttgctcccagtaagccctgcccaggagaccacaccccagccctgacacaggcttcccggggtcacacggagtcaggagtcctgaggctgggcttttgtgaggttcccaggacgccctcaggccaggccctgacccagttctccagggtctttctcagggtcaggttcatggggagggcatggggtgcttggctgagactgacctccccctgctgaggcccccccgcccccgccatcagtgtctgcagggcctggatgcaggaaaggaattctgatctgttgaagtttacctaccatgtgtgtgtcctgcactaaatgcccaaatctcaacacgggacaaaatgcagagggggatgcaggcacagcccaggcctgacaatctcatgtgtgtgaagcagaactgaccgccagcacccagaggtatgggggaatcactcacggtgtacgtggagctggccagttgcttggtcagagtcgtaactggcatttatggttcgtagggtgtaggatcctgcgtcctccagggtgatgttttggaacagcagggatccattggggtatactgtctctcgaccactgtatgcggcccctgggatatttgcttgaatgtctgttatataaccagcaatgagagggctcccttctgccgttttccccttgtgccaataataggcttgaatagtttctgaaatattgcaggccagtagaagaacatcctttccctctgcagcactggacggcagggcttcaatagtgaactggacagtggtgggcgggtgccagaaggttaaaagtgaggctaggaggtgaagacagcatcagtcaatactgggacctatggagtgggatggaaagataaggccctgggtcctcagcaggtctcctcatccctcagccttggagtgtgtgtgtgtgtgtgtgtgtgtgtgtgtgtgtgtgtgtgtgtgtgtgtgtgtgtgtgtgtccctgggtcagcagcatgacccccattccttcaacagcttggaccttggcatttccctggtggaatcttcttccccaggggtctgcacggctccctccccactgccctcagatcctgctcacatcagggtgtttttgggagacccctcccctgacacctcctctagagaccctgggtcttccctttctgacctttcccagctctgttccctccagggctcttgtcagcacctgacctcacattctagatctctttaggtgtttgtcttcctccccatgagagcgtgagctctgtgagggcggggacttgtgtgatcttggttgcaccccagtgcctggcacaggctgcagactcctgtagatgagttcatgagcattctcagggcctccaagtcctgaggtttatttcccagtgtctgaggttgttggctaagagcagtgttttatgccctggttatgtttttatttgaagtgtcatctggtatagttattatcatttttcaaaatgtagtggccagtgatgattaaccaggacgagagaacacttgagattttcctgccttttaccaattccagttcactgagattttcctgttgtgacccctgcccctctctgatgttctctcccttatccagcctccaacagaggccctcagtcccctctcagagccccaggagaccccagccagaagccctctatcccctcctacccaagagaccccagtcagtctctgtgctccctcttcccaccactcccagagagtcctcccctcacctgtgatcaggagcccctgccagggcctgtgccctccacggggagcggctgagggggggcccatggtctctgctgcctgcttgtcctctgtggagaggagctgggctccaggaacgctcttgtcagagctgctgtgactgtcggctgtcggggctgctgaccttcctccttctgtgctgagcctcctcccgggcagaagcacttcccagggccaggggcagaggcggggctcttcccaggtcacccctctgcccctcccctctcatttctgccttttttgtccctccttcccctttctcttctgtgtacattacagtttcctaaccacactttgagaagcagggttggtggagtcccctgtccccagagagggtgacttgtcacccctgcactgaccctttgggaatgtcaccacaaacagaggtactctggggtctcccaaacttggggaactgtttccttttgtgacacagagacccagctgggcccccaggtctcctcatgctccccaatactcagggagtgtgagatgatacccagcaggaaggtgacagaggtggctctgtgggatagaaaatggggggcgactacgggggggaccagtcctctctctccagtgtcaccagccttgcctctgacccagggacagagatccaggcctgggggtctcaggaggatccccagctcctggatgtggagggaggtgtcctgcatgtcctgggaagagaggactgtggtggagggaggtgggtggctctgggttctgctgtccttgaggagggattcagggagatcctccctctccgtttctgttggctgagctgtggcttagggcctgtgcatgttctcccttaccatcccgggtggcctctgtcctctgtgaaggtgattgtcctgttgtcactgtaccttccccatgcatgataccaggagaaagtggagaactgagcagagaatcctggcagagcaggatcctcagaggctccaggaaggatcaggagagacagagcaggcacatgggagggactggaagggcctgctggagcaaagtatggaaaccaggcttcacctccacctccttagcaaagccagattcctgtccaggggaatccatttcctgtgttgtctgcgtgcaatgttgcccctggagagcaagaggaaccctgtggtaaaagtcaggggcttccccagggatgctgaccagggtccacgtggtatgagttggccctggcccctgggcagaggtgggctctgacctccagactgcagggtcaggtcatccttggtcctgttcactgtgggtccccaggatgtccaactccatgcagtgcaggatgagctcagggagaggacgagagttgtccagagcactcctggtcctgatttgggagaactgtcctgcaggcggatgggctgcctcagaaagagccatccgtccccaaggtttcaaaagaagggcccagggaggtgtctctgggggtttagagagagggcactggcctgggaggtggtcctcggtgtgttctgtgttcctccatcacaacactgggagttccgcctccaggtcatctgtgtccctgtctgtcacctgccccaggcctctccacagggcccaggagctggggcagctcctacctgcaggctgcaagggatacctggttcctgtattagagcaggggaggccccgtgaccctcagtccctctgagatggaaacaaaggcagatcctgggttatcctgtcccctcctgcaggagaagttcccctggatcccctggtgaaatgtctgcagggaccataggcagatgtcccaaatactggggatctcgaggctggggaatcactccctgactttcttgtggtcattctgccctggtggaagatccacctgggatcgaatatccggagtttgtgtcagttttggtgtgtttgtgagaaagacatatgttagagcctggagggaatgtcagtgaatgatgtcagggaatgaattgggtttgcccctcactgttagaaagaccctgaattccctcccgatgctactagggtaaaagccatgttcttatgctcatttctctaaggaaatgcaaatagagtttattaaggcgtttctggccaactaaggtggattttgtcatgtagacacaatatagaccataatacatgtacatatgcaaaaacacacctaaacacatatccacaaacaaataaaaatcttacagctttcattttagaattttagtgatgagatagtaatacaaactcactagttgattaaagtcaactggatccaattgtatttctgacaaattggaatcgttaacatggataaactttatttgcccctataggtaatataatgaaggctgggggaaatattttgggtaaagcagtttctaatggcagtgtaacttataaacaaataaacaaatgaaacctctacagtttcagcatcttttttttttctgtttcacatgagtttaggattaaattttcaattgcttacactttagctagaactggctgaattgtataagaaaaaaaaatctccaactagccttaaactagattttttgtgtgggttggaggggggcgggtggtggtgatgtggtttgcttgattaacaaatgtggatgaggaaggattttagctttttttcctggctttttcttttttgcctctgcatggcaaaagaagaaaaaagtttatgtcggacagagacaccttaaattattgctctgagttcaagattttgacctgtatgatctgagagcctaacttttataaccatgtatttttttaattattgatttttaattgtgctccattataagcaattattagttagacaaacttaaatttacatttcctaaaggtgtctaagttgtttcttatcatggagttgtttaatttgtaaagccattaattttaaagcccttcaagatttcttttttaaaactctgggctagaatgccataagcagtgagttttatctcaacaccagtagaaaagtcagcagattcaaagtaggtagagaaaaaaaaatagagaatttagaagactctacatttccaccctatagatgcagggctttttaaaacaggttgaatgatgatcattgagtactgaattttccttgatgtaattttgctcataaactttaaaatgtgcacaagaaagaaccataaaatgtagccagctggagccccagaaaacctggcatgccttaatgcttgagagccccattccatttcttattaatctcttgaaagtgaagaaaattttacaaatcctgccagagaatgtcaggcatttgtaccagtgttttagatggtggcaaccacgctagtggctgttaattagccattttgtgcccgtcatttagaatgtctatttttttgtgttctgggatgattttcagaagcaagcaaggggaaaagagtcaaaccaaataaaaagaaatccagataagagcattcacaagaattttaacccaggcatgcagatttttaaagtatttaaattaggcacacaggccaaaatggaagtaaattcaccagaatagacttgcctcacaggcagaatgtaaattttgtagaatccagagtacgtgatctagaaagatatacgcctttctctcagaaaggacttgctagaaaagacaaaaagttttttttttttttatcatcccaggagaaatgtatggtcttttactaaggcagccttatccaaatcagattccaaataaagtcaagagcttctaccaaaaagaggctctgcttgagcaaagacttgtcagggcaggaaaggtgagtgtggaagcagagagctcaaacttctcaagtgagtagtgcacactggttcaaagatcacagatttcttctgatagtgatctttcccagatcccacttctgacaccatatatggtaacaaacagagtgaggctttctatgagaaactgatgtttatttgggagtagcacatttcaatggaaatgcatgtgccatagtaaaatgatctacatattcgagtttttaaaggaaaaaattgggattattatctagtcattttgaaaaaaaaaaaaaaaaactagctacaaagatcaatagccagaatgatgccactgtgaggttctataggcagttgctgggcagatgtccttgcagaagtagttttcatataaggttgtgatggcctttgtataaacttgtggcttttgcagagtcttttgtgatagttttgttatcaggcatgaggatcctctcttcatggtcttctctggctctatttgtcagagttttttttcacactagtgactcattttgactctgacaactttcacatctgttaatacttaaagaataaataaaattaaaaagactgaagtctagtagaaaagtaggcaaatatataaacagtttacagaagaaaaaacaatttgaatgattcgtagacatatgaacaaaatacccgcacacatgcaggagaaacggacattgatattatcctggaaaggtgaggatcataatatggcccagtggttttaaatgctgaaaaattccatttgataacacaacgtgtgggaagaactttggtaaaaattgtacttcctaactttgttgggtgacatgaaaatttgtaccaactgtgtggcatcaaatttgtcaacacttatcaaaatttaacatatgcattctctttgcctcccaaactgcactgcaaggaatttatcacacactcatgaaaaatgacacctaatcacggtttctcatggcagtgatggcttaacagcaaaatactgaaaacaacctacatttacattagcatagttaaacaggttatatacatttacacaatggaatatgaggcagatatgtaaccaacagggaattgttttagccactgatgcggaaactcctccgtagtgtttttaaattatatggcataaacaacatatagcctatgtgtggttttcacattgaatgtgatcttaattttttttttttttttgagacagggtctcatcttgttcccaggctggagtgcagtggcatgatcttggctcactgcagcctcaatctcccaggctcaagtgatcctcctgcctcagcccccgccccccaagtagctgggactacaggcatgtaccaccatgcctggctaatttttgtacttttttgtaaagacagggtttcaccatgttgcccaggctgttcttgaactcctcagctcaagtgatcctccagccttggcctcccaaagtgctgggattacaggcgtgagtcatcgtgtccggcctaatctttttaaactttagagttgagttcatatgtatttattctataacttttgttttttaacttaatacttctgtatttggggtatttttttctattgtccacttttctggtgtgtttccatccattgtttttgactgattcacttctttgacttaatgatatggtatatatatatatttttttttctttttttgacagagtcttgccctgtcactcaggctggagtgcaatgatgccatctcggctcactgcaacctccgcttctcgggttcaagtgattctcctgcctcagcctcctgagtagctgggattacaggtacgtgcctccacgcccagctaatttttgtatttttagtaaagatgggggtttcaccatgttggccaggctggtctcgaactgccaacctcatgatccacccgcctcagactcccaaagtgctcagattacaggcgtgagccaccgtgcccagccccatgatatagtatctttttcctttaatgttatctcctacatctcatcacaaacatttatgtatacttcacaattaccttctggttcccaaattatgactcttgcacagtgaggattcttcgagatctctccctgttttcagcactccctgaaatgttttcaaagcttcctttatattgacatttatggatattttgagctagtacagatttctcctactccaagatatggattcacctgtgcctccaggagcactggctcgtctaataaaaataagaattagaaaataaatcatatcacagaccacaaactggacccatggggtgaattttaattgttttccatgaatacaattgcagagaggataatattgttaccagtggaaggtgtccaggttcttggtgtattggacaaaacgcacaaacaaggcaataaaagaatgaagcaaaaaacacagattcatttaaatgaaagtacactccacagagtagaagtggcctcaagcaagcagctcaagagtgctggttatagaattttctggagtttaaatatgctctagaggtttcccattggctacttggcttactccctatgtaaataaagtagtggcctgcaatcagtctgattggtcgtggaaggcaaccaatcagaggctgaagtgaagttacaaagttacatccctatgcaaatgaagactagacccttgaccagtctgattgttgcaggagggaaccaatcagaagtactttccatttctcatctgcaatgcagaaaaaggtggggttgtaaagggtgtaccctctgtccttttgttcttgggcttgggaagtcgaggttgctttagagtggtcaaagggcagggctggggcagaccccaggggcagtatggaggccccccagtatgtgtcctggaggagccgagctctcacactcggaatctgtccatccctgagttagcacccagttgcctggaaccccctcctccccacaacgaccccatgacctgtgcagagtgggtgccctcagcacctgcagcctctccctatcctgatagcagccatttttcttattttctcaataactcaggaggacacaccctcacctgtggacctagctctttttttttttttttttcaaattatacttgaaggtctggaatacatgtgcagaatgtgcagttttgttacataggtgtacatgtgccatggtgatttgctgcacctgtcaacctgtcatctacattaggtatttctctaatgctgttcctccccttacccctgagccccccaacaggcctcggtgtgtgatgttcccctccctgtgtctatgtgttctcaatattcactgagagacctctgttctgttccattggtctatctgttttggtaccagtaccatgctcttttggttactgtagccttgtagtatagtttgaagtcaggtagcatgatgcctccagctttgatctttttgcttagcattctcttggcaatatgggctcttttttggttccgtatgaactttagagtagttttttctaattccatgaagaaagtcaatggtagcttgacgagaatagcattgaatctatacattactttgggcagtatggccattttcacaatattgatttttcctatccatgaacacggaatgtttttccatttgtttgtgtcctctcttatttgcttgagcagtggtttgtaattctcctcgaagaggtccttcacatcccttgtaagttgtattcctaggtattttattctctttgtagcaattgtgaatgggagttcactcatgatttggctctctgtttgtctattattggtgtataggaatgcttgtgatttttgcatattgatttagtatcctgagactttgctgaagttgtttatcagtttaaggaattttggggctgagatgatggggttttataaatatacaatcatgtcatctgcagacagagacaatttgacttcctctcttcttatttgaatacctttatttctttctcttgcctgattgcctcggccagaacttccaatactatgttgaataggagtggtgacagagggcatctttgtcttatgccagttttcaaagggaattcttccagattatgcccattcagtatgatattggctgtgggtttgataaaaatagctcttattattttgagatacatcccatcgatacctagtttattgagtgtttttagcatgaagatgtgttgaattttatcaaaggccttttctgcgtctgttgagataatcatgtggtttttgtcattggttctctttatgcgatggattacgtttgttgatttgcatatgttgaaccagccttgcatcccagggatgaagctgacttgatcatggtggataagctttttgatgtgctgctggatgtggtttgccactattttattgaggattttcgcatcgatgttcatcagggatattggcccgaaattttcttttcttgttgtgtctctgccaggttttggtatcaggatgatgctggccacataaaatgagttagagaggactccctctttctctattgattgaaagagtttcagaaggaatggtaccagttcctctttgtacctctggtagaattcagctgtgaatctgtctggtcctgggcttttgttggttggtaggctattaattactgaatcagtttcagaacttgttattggtctattccaggatttgacttcttcctggtttagtcttgggagggtgtatgtgtccaggaatgtatctatttcttctagattttctactttatttgcatagaggtgtttatagtattctctgatggtagtttgtatttctgtgggatcagtggtgatatcccctttatccttctttattgtgtttatttgattcttctctcttttcttctttattagtctggatagtggtctatctattttgctaatcttttttaaaaaccagctcctggattcattgattttttgaagggctttttgtgtctctatctccttcatttctgctctgatcttagttatttcttgtcttcttctagcttttgaatgtgttttctcttgcttctctagttcttttaattgtgatttcagggtgtcgattttagatctttcccactttctcatgtgggcatttagtgctataaattcccctctaaacactgctttatctgtatcccagagattctcataggttgtgtctttgttctcattggtttcaaagaacttatttatttctgccttaattttgttatttacccagtagtcattcaggagcagattattcagtttccatgtagttgtgcagttttgagtgagtttcttaatcctgagttctaatttgattgcactgtggtctgagagactgttcgttatgatttccattctcttgcatttgctgaggagtgttttatttccagttatgaggtcaattctagaataagtgctatgtggtgctgagaagaatgtatagtctattgatttgtggtggagagttctgtagatgtctattaggtctgcttggtgcagagctgagttcaagtcctgaatatccttgttaattttctgtcttgttgatctgtctaatattgacagtggggtgttaaagtctcccactattattgcgtgggattctaagtttctttgtaggtctttaagaacttgctttatgaatctggatgttcctgtattgggtgcatatatatttaggacagttagctcttcttttgcattgatgcctttactattatataatgcccttctttgtctttttttttatctttgttggcttaaagtctgttttatcagagactaggattgcaactcctgctttttgtttgtttgtttgcttgctttccatttgcttggtaaatattcctccatccctttattttgagcctaagtgtgtctttgcacatgagatgggtctcacgcaccaatgagtcttgacgctttatccaatttatcagtctgtgtcttttaattggggcacttagcccatttatatttaaggttaatattgttatgtgtgaatttgatgccatcattatgatgttacctggttattttgcacattagttgttgcagtttcttcatagtgtcgatggtctttacattttggtatgtttttgcagtggctggtactggttttttctttccatatttaatgtttccttcaggagcttttgtaaggcaggcctggtggtgacaaaatccctcagcatttgcttgtctataaaggattttatttctcctttgcttatgaagctttatttcgctggatataaaattctgggttgaaaactgttttctttaagaatgttgaatattggctcctactctcttctggcttgtagagtttctgcagagagatccgctgttagtctgatgggcccttcagattgagaaatccttagattggagtcacttcaaatccagaagttatgaggactgagctgggcaatcttcattccataatacattttttgaaaagtacatgcccttcctattctatgaaaagctgccctggcctcagagatgaacacaactggcaagcctgctcatgtagtttggatgtttctcccctccaaatctcatgttgaaatgtaatccccaatgttaaaggtggggcctggctgggtcatgagggcaggtccctcatgaatggctaggtcctgtcctcatgatagtgagtgattttgtacaaggtctggttatttagaagtgtgtggtgccaggcacagtggctcatgcttgtgatcccagaactttgggagactgagggaggaggattacctgaggtcaggaactcaagaccagcctggccaacatggtgaaactccatctgtactaaaaatacaaaaattcgccagacttgatggtgcacacctgtaatcccagctacttgggaggctgaggtagaagaatagcttgaactcaggaagcagaagttgcggtgagctgagattgtgccactgcattccagcctgaatgacagggtgagactgtcatggagtgacacctcccccctgccacttactaccactctcaccatgtgttatatctattcctcttccctttctgccacaagtaaaagcttcactggaagccaaataaatgctgtcaccctgtttcttgtgcatcatgcagaaacatgagccaattaacttctttttttgcaaattatctggtctcaggtatttctttatagcaacacaaaagtggcctaatacacctgccttccccccaatacatagaagtttatatgaggaacagggactgatctttataaagccacaaagagtgctaagaaagaatctcacaaaagtccacaggagaaaaattcaacctgatgatgaggttgcaaaatctgcgagctgagaaggagttcctattgtgggtcccacagagatgtctgggagaactccaaggtcaccatagggtggtctggggtgaaagagaggtgccaccttatccttacagattgtcacctgagcaaagactcttgatcttctgcagagggtcagggccatcccctggatggtttcctttgcacacctcatggtggaacctgagagctggctgggatctctgggaaggaacatggccccaggccccaggaaactctcagtcattcatctcctctctttgtccacagggtcagtggctcactcctccttctgaaccagcagcttacctccagcaaaatgatcctttcaggctgactgtgaaatagcagacatctgagtcctctgttataggttattaaatctaaaatcaaatttttctctgcttggaggcattttattataaaaagttggtactcgtacacataaactaatataaacttgaaatttactatacatttacatttcttagcttgtccttacagtaaatttttagcttcattgatcttggctattatataaagagaccctcttttgtctgggtgatttaagagcataacatgttgataagaacctcttactgtttcctttattggcgttagggcttacatctagtattagtgctgcttcctgttttgtcattttgggttcaaccccacctctgtcgtaataacctctgaaaaatattttggtagactttgaaaaacttgttttacttgaggctttctgtgcttcgtggcttgccaaacataacagcttgcaaatcctgcagcagcagtcggtacagctgctaccactgcacaggccatggctccagcctggctcccctgcttccaccaggagggtggatcatcccagcccagaggccgcacccactacctacttggctttaccagagagcaatgcagcagcgaccacagtagtcacaaattgcccaagcacctttttcctttttaaagtggtggtgatgatgcatttactttattgagctgttgtgaatagtcaatgaaatcaggtgacttgcattgagtccataaatactaaacactgtggactgacgttgtcattgttggcttaaggtcccattcaacaccagataccactgtttgtctcagttgcaccatctccacagtggtggcaacatcgtttccctcagaggatggaccataattgtgtttgagggtgagaacatgttatcagagggaaggaaaactcctggtctgtggaagggccacagtgtccctctaagccaagtcacaacattgtttgagaaagtaccaaccaaatttccgctgtgttcactgagcctgagtctgagacattcacctgtttctcccattacaggctgtggaccccaagcctcccatgacaggagcagtccctctccacctatttttggtcagggctgtgcccttccgggtttgcctggggcaggaagtcacagccagcctgggtatccaagggcaggggtctgtgttcttggacccaaggggaagtgaatggtttgagctctggctatgtggatttgagctggcagcctgagccccagaagaagagaagatacacgggacattcaggctaactgggtcgctgcagtcggcattcactgggttctgggttccactctcatagagtcctgtgtcactacctgtgacactgagtaaagtgaaggtcctgttgcccttggacatcttcagcctgggactggccaggaagctctgaccccttactcaccacaggtatgttgtgtcctgagtctcaggttcacagtttaacctacagagtctttgtcctccacgggggtcctgttgccttgatggagggctttgtaagctctactgtgcagataacagagagaagactgccctatggggcaccctgattactccatagtgaacatggaacgcatatagcatgcacgttttcttatcaaacttgtgtaagtcaaaccttcatgaatattaatagctcctcctaaaccctattgaatgtctacttggccaacctgttcagcgtcaaaccctgttccaccctccctccttcaagtgcctgctattggtctctgcaggaagctgcacttgctagcctgaggaatggccagcaggcaggctgtaatattttataaaaaataaaggcaccaggtgcaatagttcaggcatgtaatgccagtcctttgggaggccatagagggaggattgctagaggataggagttggagaccaccctgggcaacatagcaagaccccatctctaaaacaattttttaaaaaattagcagagcatggtagcaagtgtctgtagtctcagctatgatggaggctggtgtcctctcccttattcccacttcagcagaaaccctcgatccctctcagagccctgccctccccaggagaccactgccagtctctattctccctcctcccacccactcccagagaatcttcccctcacctattaccaagagcccctgccagggaatgaatcctctgcggggaggggctgagggggtcccagggtctctgctgcctgctctgtcctccactgtggagaagagcttgggctccagaaatgctcccaagcatggctgctctgactgtcagctgtgctgtttgtgctgaaactcctcccagggcacttcccaggtgggcctgaggtgtggtctcagcccaggatgcttctctgtcccctcccttctcacacttgcctcctttttctttgccttttccttcacttctgtctacattttggctcccccagaacatgctttgagaagcaactcttatttggaccgctgtaccataacaggatgagctgcgttcctctgcgctgacctctgctgtgtcctgggtgtggatctcttatgcaccacgcagagagtccctagggtcccccaacccagctttttcctctatgacacagaaacccctctgtgcattcagagtcttcctagtgttctctaatggctgggaaagttggatttactcccaacaaggaggtcacagagatgtccagggagagggttcctagaaatgcacacatggggctaaaacccatgtctaagattcttagttttcctttatgcagcactatgagactttaattttatagacataactgaagatgaagctgcctggtgctatagtattatgtctcccaagcctcagatatttatagaccatctctataatgttttctacagtttgtaccatctttattattattgacttcatacattttttctaaataaatttactttacaaaacacccttgtcccagcagcgtgcaatggcttacattgtaatcccaggtacttgagaggctaagatggggggatcacttgaagccaggagtttgaaacaaaacatccccgtcctttgcaatattgtccatgaaattaaaggttttgtgaatttgcttaaaattgtttctaacatgcattaaaataaacatataactattaaagtttcttaaaagcttatttatgttccacctaaagtcagttttgggaaacactgatacagtggaataaccatggactttttatatccagagagacctgggactcactactggttctgtcacttaactgtgtcatcttgcacgagtcacttggcttctttgatcctcgattccataatttttaaaatgatgatgataaaatccactttgcaagctgttaggaataagatttgcttcagtcaggaggtggaggttgcagtgagctatgattgcaccactgcactccagcttggatgacggagcaagactctgtcaatgaaaaagaaaagaaagagagagagaaaagaaagagttacttccacttgttaggacttgtggtgcgtctgccattgttttcatttcccagttccactacctatgtgctctgtgattttgatcaagttgcctaacttttcctcatttacctaatttgtaaaatgtggggtttaccagtacactagtgtgagtgttatttcccagctctgaccactagagggcgtaggagcatcggcacccactggcaatggatgtgtcggtgcccatggtttaccaacatcattctcccatgaaaggaaccagggctccctggagaaatagctgatccagggctggggcaggaaagcacaagagaagcccggagctttttgtgaggccagaaagtaaggaaccactcgaaaaattatgggaatgtttcaaaagattacagggagcttagaattaccaattttgggacaacatgagcaacataataatgatagcaatggattccaacccataaatatccatgagtccatgctgatataaataattgaacaaagaaataaataaggaagaagaaatagctctttcttatagcagaattccaattaataaatgtagaaggaattatggaaataaaaaatcactatttggctaacaccacagtaataattgtttataggccagaatcaagaaccatccacagattctaaaaattaatgggtaaaggtaagatgatgctgtaactattgagtatgaaggaggggtcaggggaagtaaggtgagaagaaacaggctactggtttgttcccaaagtatctgtccacaagatacttattaattacaatgagatgaatagtaactttatagtagagaaacctggcaaacaccacctgaaccaagcgcttaaagtgaacctcatcggtaatgagagatatggacatcctggggctccaggtgggatgtcctgagaaagacacatcacttctgtgctaatcttacccaaaatgcataacctaaaacatcccaaggaaacaggagacaaacccaaattgagaggcattctacaaaacaactgaccagacctcctcaaaagtgtcaaggtcctgagagagggaaagagtgggaaactcccccaggttggaggaggcctaggagatgtgacagtgttattcagtgtcagatcttggattggatttgggagcagaaaaaggacatgagtgggatgattagcaaaatttgaatatttgtagatccccttggttaatgttattgcaccaatgctagttccctgatatgaacaattatattagttatagaagatgttatttgaaaaaaaaagctggataaaggataaactggaaccctatttttaaagatttttgaatgtttaaaaataaacatgataaatgaggccgggtgtggtggctcacgcctgtaatcccagcactttgggaggccgaggtgggcggatcacgagttcaggagatcgagaccatcctggctaacacggtgaaaccccatctctactaaatatacaaaaagttagccgggcgtggtggcgggcgcctgtagtcccagctactcgggaggctgaggcaggagaatgacgtgaacccgggaggcagagcttgcagtgagccgagatcacgccactgcactccagcctgggcgacagagcaggactccatctcaaaataattaattaattaattaattaatttaattagattaaataaataaacgtgataaatgaaaagtcaaaattttaaaaatgctttagatttctgtgaggccaaaatgagtgtatagtgcttagaacaatgcttgtgacataggagttcttaacatgtcagctattattataagtacttttataattaataagtaatgttataaggaaagagtaatctgttattataagtaatttatttcctaatgtcctcatatattctcatatttttttcctctctgctgttaaatccatatagagcatgtacttggttattttaagatataagattagaggaggtcgcggcgccggaggccccagaagggtcgaaggcgccgcgggctggggtcggtggcttagggagcccgtctggccatggtggccgcggctggtggttggcgcggctgcgctgcggcccggggcagtgcggagccaggacagtcgcggcgctgacgcccgcgggccccagctgcagatatgaagcggagccgctgccgcgaccgaccgcagccgctgccgcgaccgaccgcagccgccgccgcgaccgaccgcagccgccgccgcccgaccgccgggaggatggagttcagcgggcagcggagctgtctcagtctttgccgccgcgccggcgagcgccgcccgggaggcagcggctggaggagcggacgggccccgcggggcccgagggcaaggagcagccgcctgccttggcctcccaaagtgccgagattgcagcctctgcccggctgccaccccgtctgggaagtgaggagtgtctctgcctggctgcccatcgtctgggatgtgaggagcccctctgcctggctgcccagtctggaaagtgaggagcgtctccgcccggccgccatcccatctaggaagtgaggagcgcctcttcccagccgccatcacatctaggaagtgaggagcgtctctgcccggccgcccatcatctgagatgtggggagcgcctctgccccgccgccccatctgggatgtgaggagcgcctctgcccggccgagaccccgtctgggaggtgaggagcgtctctgcctggccgccccgtctgagaagtgaggagaccctctgcctggcaaccaccccgtctgagaagtgaggagcccctccgcccggcagctgccccgtctgagaagtgaggagcctctccgcccagcagccaccccatctgggagggaggtgggggggggccccccccacccggccagccgccccgtccggtagggaggtaggggggtcagccccccgcctggccagccgccccgtccgggagggaggtgggggggtcagccctccgcccggccagccgccccgtctgggaggtgaggggcgcctctgcccagccgcccctactgggaagtgaggagcccctctgcccggccagccgccccgtccgggagggaggatgaggggggggtcagcccccccgcccagccagccgccctgtccgggaggtgaggggcgcctctgcccggccgcccctactgggaagtgaggagcccctctgcccggccagccgccccgtccgggagggaggtgggggggtcggccccccgcccagccagccgccccgtccgggagggaggtgggggggtcggccccccgcccggccagccgccccgtccgggagggaggtgggggggtcggccccccgcccggccagccgccccgtccgggaggtgaggggcgcctctgcccggccgcccctactgggaagtgaggagcccctctgcccggccaccaccccgtctgggaggtgtgcccaacagctcattgagaacgggccaggatgacaatggcggctttgtggaatagaaaggcgggaaaggtggggaaaagattgagaaatcggatggttgccgtgtctgtgtagaaagaagtagacatgggagacttttcattttgttctgcactaagaaaaattcctctgccttgggatcctgttgatctgtgaccttacccccaaccctgtgctctctgaaacatgtgctgtgtccactcagggttaaatggattaagggcggtgcaagatgtgctttgttaaacagatgcttgaaggcagcatgctcgttaagagtcatcaccaatccctaatctcaagtaatcagggacacaaacactgcggaaggccgcagggtcctctgcctaggaaaaccagagacctttgttcacttgtttatctgctgaccttccctccactattgtcccatgaccctgccaaatccccctctgtgagaaacacccaagaattatcaataaaaaaataaattaaaaaaaaaaaaaaaaaaaaaaaagaatggactttcccaggccagctgtggtggctcacgactgtaatcccagcactgtggcaggccaaggcgggcagatcacctgagatcaggagttcaagaccagcctgaccaacacggagaaaccccgtctctactaaaaataaaaaacattagctgggcgtggtggtgcatgcctgtaatcccagctacttgggaggctgaggcaggagaattgcttgaacccaggaggcagaggttgttgtgagctgagattgcaccattgcactccagcctgggcaacaagagggaaactccatcaaaaaaaaaaaaaaaaaaaaggactttctcaaagaaaatgtatttaaatgtctgcaccaataattccagcatgtgtatgaataaatatgatatgtcctttaaaaaaaaaaaaaaaaaagatataagattaggtctgacgtggtggctcacacctgtaatcccagtgctttgggaggccaaggcaggcggatcacttgaggtcaggtgttggagaccagcctggccaacatggtgaaacctcgcctctactaaaaatacaaaaattagcgggtgtggtaggcgcgtacctgtaatcccagctacttgggaggctgaggagggagaatcgcttgaacatgggagactgaggttgcagtgaacagagatggcacctctgcactccagcctggacaacagagcaaggctccgtttcaaaaaaaaaagacataaaataagattagattttattttgagaattattttagggatagaggagctattatttcctttagccactaacagtagctgaaattcaggccggattgcaaaactttgcttggctgagaaacaaagcttgagccaggctgccacccaccccacgcggtttgtgatggcgccccctggcggcgcagcgagctttccggttcctcaacctcgtgctttaggagcgatattttattttattttattttattttatatattgttagttcaatagtttttggttacatggataagttctttagtggtcatttctgatattttggtgcacccatcacccaagctgtgtacactgtacccaatgtgtagtctttaatccctcacccttctcccaccccttcccgctaagtccccaaagtccattacattatcccgatgcctttgcattctcatagtttagttcccacttataattgagaacatgtgatatttgtttttccattcctgagtttcttagaataatggcctccagctccattcgagttgctgcaaaagaccataatttctttcctttttatggctgagttagtagtccatgttgtatatataccaccttttctttatccacttgttggttgaggggcacttaagttggtaggagcgactttagaaattccactcagtctattccttgaacgctttctagctcacattgtggatcctttaatcttcacaacatgtctctgtaagaagtggtatttttaacatttattttatttattatttattaatttattttgacagggcctcgctctgtcatccaggctggagtgcaatggtgcaactatgctcaccgcagcctcaaccacctccagttcatataaccctctgcctccgccttccagtagctggaacctcaagggcacaccaccgcacctggctaattttttaaaaaattttctagagacagggtctcactttgttgccagggctggtctcaaatgcctagcttcaagtgctcctcctgtttcagcctcccaaagtgctggggttacaagcttgagccaccaaagctggctaagaaggagtatttaatcctcttaagatgataaaactgaggttcaaaagagtaaagcaacttgcccagggttgcaaagggagtggcagagccagaatttggacctaggtccccctgacttccaggctgagtataaatgtctaggtgaatctaaatgtgtatccaggtagagaagtattggtgtagagcaggtgttgtcaattgggggtggtttcccccacagagacagttggcaatgtctggagatatttttagttttcataacaggggtggggatgggagagatggaaggctgctattggcatctagtgaagaaaggccacgtggatgctgctgaacaatgcacaaggcacagaacagcccccaccacaagcaattgttcagcccaaatatcagcagaactgctatgaagccctggttggacttagaaacctgaagatgcattcttgcagttagctaatgtttgccaagtactgagctggacaacgtgagggatatggaaacagtgcaccactttgtgctgccaaggaggctgcagcctagaaggtcaggggttggaggcaggagaggcgcatgaaggccttcaacataaggcagcagatgataagtgtcaagaacagagtgtccagtagggctaggccagctctcaggagggagaccacatgtctggctgtgggagaaactgagggaagctgtggaaaggtggttttgagctgggtgtgtgagcaaagttgagctgatgggaaaacacaagacctgttcagggaagggcaaaaagtctagtttgggtggggagagagtatttttttattgagtagagagggaaatgctggaaaagcaggttggggctagagctttgagtccaggctaaggactcaagcctgggtgtctgtcacagagatggaaaagcctttcctctcagaatggttgtctagaccgtagggctacggggctcagcagtttcccgagtgctctctctacaaaggaggggacattggaaattgtagtgtaggagggtgaacatctcctgattttaggaccaatttcatgctgagtatgtgacaaacccatttcacatcaaagtggcccttgggtagatggtgttcccaagtgaaaatttacatggggtgagctctcttctgcgtggttgctctgtgaaagcctgggccactttatactgaaaacccagagcagacttgaagcccctaagcaaaggtttgctaccctaaaggtgagttgctacagcaggacttgctatggataaagttgcaaatatggacactacctggtgacaggatttttctagtttattactttaccattaaatagcattaagacatgtttgtggcatgtatggtacactgtaaagactataagtaaggatttcctgaccttctatacatgtacagttgcctttaacaacctcccacctctgccaccatgtttggccccagagaaatgcattactcttctggaaaaggggttagaggagaaggcaagagagcaaatatttgttgagctagcgtgtgtgtgtgtgtgtgtgtgtgtgtgtgtgtgtgtgtatttgccagctaccgttgtggacactttcccatacagtatcttaactctcttgacaccgtttgtatataagtacagtttacttcttttgataaaggaggaagctggcactggaaaagactaacttgccctaatcccctgtagctgaaagaagctacattttgatgcatgtgtggcccactatgccacattttctcctcccttttttccattcataggcaattaatcttatccacctggacttgggctgctagagaccatggtcattagcattagtggcagcaacagaaggaggaaagagattagaactttcattgtgattgttggtgcagctgtaagtcatttgaagactgtatggaagtttcccggttggaggctcctgatctctggggatggctcaggccagggtactcagcccggtggtctgcactttagtcccaggtcagtgtttccatctgagggcaagagcaggtgaggtgatgctggccttactgttaagtaacagattagacgatgtgctttccagaaatgtaggagataaaattcctcaaacaaaaaaataagacagaaggtgttgcagcagagagtttaatacttgcaagatggccaagcaaagaggatgggagatatttttcaaatctgcctccccaagaatttggagactagggttttaaaggagtgtttggagagcaggggactaggaaatggacacggctgattggttgggctggaaatgaaatcatcgggtgtcaaaattgtcttgtgcactgagtaagttcctgggtggagctcacaggaccagttgagtcagtttcttagtgtaggtcaacagtctgggtggtgtcaattgatccaccagaatgcaaagtctaaacaatatctcaaactccagccttaaatttcacaatagcaatataatctataggagcaattaaagaacatataaatcttgtgcccactggctacgtgactcctgagcagcaggtaattataaaaacaaaaaaaaagatggggaacaatgactgtttgctgtttaactctgcctatatcttagctaaattcaggcccctaccataattctaaccttgcaacatttcatttgttttacaaagttggtttcaattccagaacaagaaggggattagttaaactataaattccttctatagttaggctggcctatgtacaggaataagcaaaggtggatagtttgtgaagttagaagcaagatggagccagttacattggatttctctcactattaaaattttccaagggtggtttcagttccccctgggcttaagcattccttattcctgaggtgtgagcagatgatgagatggaaggggttgataaccactctaacttcttcctgatgatagggggcatcattggggtttattccaggataggagaaatgaaactgtcttgctgtcgtcttcctatattcacgaatgcctggttggggacccaagttttgcatgacaaggatattagtattcacatccccagccgcagcacagtacttaagtgaacagcagactgtaagtgttgagccctaatataaagagtgaaagcccaagtctcaagagttcttgtggaactgatctgaaattttaaggcatccagataaataacaccgagaaccaatcagacatggggtcaccggtaaagacctgctgtaaccatgaagtttcttgggaatttctttctatccagatttcaacttctcctgaggtgtttatataggtgcaacaagtggtgtttcatattgcacaaattcccctttgtctagccaacaggaaatcaagcaccaacagattgtctaggactacgtgagctagcaaactgaaggaactttgttgaaccctaagggtttttgcagtttcttctagacaatcaatccgaaggtagcagacaggttcctgatcatgtctctgttgccataaacaccataactaggaacaaatatccctagaaggctctgccaccaggtatcttgatgtctgcctgaagtcctcgttttgttctatggggaaatcagtggaatttatcaccatgaagataggctgagaagggagttacaaaatgtcccggtaagcaggagcccttgatatgcaggctattgagacacaggtgggctcatcctaatagagcctgcagatacctgtatgaactggatgaattcctctctttgcaaggtcccaaagtaacttggggttcctggcctatcagaaagtggcattctttacttacttcacatcagaaatcctgtaaaggaactgcatagacaaggtacaagaccagctcttccaaggggcttttattggctctataagtcaacttcaatttctgaatgcaggctgctcattccaaagatagctcactgaaaggaaaattcaagacagggaatcagaagctgtccatgaaaggggataagatcaataaatggcaaaagtcacagagatatcaaaccagaaaaatctgcctgagccagacatcaaacccagtccactgcagtgagagggcaaaccttagccactgagctacagtgtagggcagtctccattgctattcccagaagtaatctagagcaggcagtgttcagcttacagaagatttttttctaaatttttaaattaattaaaacattatagaggagacaaacagttattcctacccttttgccagcttgtcagcttcctggattccctttgtctgtggcttccagaagaccagagttggggtcaagccatgttataaaagaaaatcatccttttccacttcatggaatcataagcaaaaggcctcccaattttgcaagatgcagcccaatgggctgcacaggagagccaaattaacatttcccattctggctgaagtgatatacacataacaaaacacagacactagtcacccaactcagcacccatgtatcaacctgacaaagctcaaacttgcccttgttggcccctatcatctttgatccattcagggtatgaagatataacctctgaccaggagttcaatgggtagtctctgggaaagatgggaaagtgactgtcaccctgagttaggctggctgagtttccactagcgattccttcagagttcaccaaatgtgactacccagataaacagctcccagagttaggcctgctgagcttctgataacaagcccttcagggaatcccctccataaacataaatgtacataacaagacaaagacagatgaatacaaattcaagaagggagggaaaaacctgcagtgaccccatggtcagggctgaaggcagcgagtgcactgcgagctttgggtttctgtggtcagcaagccagagcagcacctcttgggtgggctgagcccaccccacaccctcagcgcgctgaaacacaagagtttagcactcaaggggatgccccaaaatgctgccggtgctgcccctggacaggactgtcctccagcacatcctcagccactgaggagccatcagcttcagctccagctccatgttcttcagctgtcccaattcccggcagctatcccagaggtgtggagctatctcctatgacagttctgatcacactgcattatacctcatgtgctaggagatgtacatgtaaggagccaagcaggatttgaatctgaaagaagagattctcaactatatattgattttcatgttttccacttgggctcttcatgccagaattaaaaatttccctagatattatctgtcactaaaaggtatttgtgggaagatggtggacaggaagcaggactacattgcaactccagctcagagggacagagtggtgtgtagaatcacattgtgaactcttgctccagaactattgcaggaatataccaggaaagctgagagaatccacagatcctctgaaagaagcagattgctccggcaggacccaggagacagcccaaatactgtgctggtatccatggatgagagatctgaagatgatttacatcataggtctctgtgcagacactcccagtaccagcctggagcctggtagccttgctaggtggctagatcctgaagagaaataacaatcactaaaattcagctctcaggaagccatatccctcagaaaagggggagagtactacatcaagggaacaccctgtggggctaaagaatctgaacagcagccttgagtcccagatctttcctctgacatagcctacccaaatgaaaaaaaaacaaaaaaacaaaaaaagaaaaacagaaaaacaactctggtaacatggcaaaacaaggttctttaacacccccctccaaaaaaaaaaaatcacactagctcaccaaaaatggatccataccaagaagaaatccctgatttgcctgaaaaagaattcagactatagattattaagctaatcaaggaggcaccagataaaggtgaagtctaattcaaggaaatccaaaaaaatgacacaagatatgagaggagaaattgtcagtgcaacagatagcataaatgaaaaacaataaaaacttcaggaaataaagaagactcttagagaaatgtaaaatgtactgaaaagtctcagcaatagaattgaacaagcagaagaaagaacttcagatatcaaggatgaggttttcaaattaatgcaatccaacaaacacaagaaaaaagaatttaaaaaatgaataaatcctccaagaaacttggtattgtgttatacaaccaaacctcagaataattggtattcctgaggaagaaaagaaatctaaaagtttggaaaacatatatggggaaataaacaagaaaaacttccctggccttcctagagacctacacatccaaatacaagaagcttaaagaacacctgggaaattcaatgcaaaaagatcatcacctaggcacattgtcatcaggttatctaaagtcaagataaagaatcttaagagcagcgaggcaaaagcaccaggtaacctataaaagaaaacccatcagattaacagcagatttctcagcagaaaccctacaagctagaaggaattggggccctatcttcagcctccttaaaaaaaagacaattatcagccaagaattttgtatccagcaaaactaagcctcataaataaagaaaagatacagtctttttcagacaaacaaatgctgaaagaatttgacactacctagccaccactacaagaactgctaaaaaggagctctaaatcttgaaataaatcctggaaacacatcaaaacagaatgtctttgaaacaaatctcacaagacctataaaacaaaaatacagttaaaaaaattctaaatctcaatactaacattgaatgtaaatgacctaaatgctccacttaaaagacacagaattgtagaattgataaaaatttaccaaccaagtatctgctgctttcaaaagactcacctaacacacaaggactcacataaacttaaggtaaaggggtgggaaaagacattccatgcaaatggacatgaaaagcaagcaggagtagctattcttatatcagacaaaacaaacattaaggcaacagcagttaaaaaagacaaaaagggacattatatgatgataaaagaccttatccaacaggaaaacatcacaatcttaaatatatatgcacctaaatttatgttcccaaatttataaaacaattactactaaacctaagaaatgagagatacagcaacacaataatagtggggacctcaatactccactttcagcactagaccagttatctggaccaaaagtcaacaaagaaacaatggatttaaactataccctggaacaaatggacttaacagatatttacagaacattctacccaacaaccacagaatatacattcaattcaccagtatgtggaacgttctccaagatagaccatatgataggccacaaaacaagtctcccaggatctgagcagaaataaatgaaattgaaacaaacaaacagaaacacaaaagatgaataaaacaaaacgtggttctttgaaaagttaaataaaattgataggccattagcaagattaaccaagaaaagaagagagaagatccaaataagctcaattagaaataaaacagaagatattacaactgacaccacagaaatacaaaagatcattcaaggctactatgagcacctttatgtgcataaactagaaaacctagaaaaggtggataaattcctgaaaagatgcaaccttcctagcttaaattagaaagagttagaaaccctgagcagaccagtaacaagcagcaagattgaaatggtaaccaaaaaattaccaacaaaaaaaaaagtccaggaccaaacagattcacagcacaattataccaggtattcaaagaataattggtgtaaatcctactgacacttttccacaagatagagaaggaggcaatcctccctaaattattctgtgaagccagtatcaccccaataccaaaaccaggaaaggacataacaacaaccaaaaaaaaaaaaaaactacagaccaatatctctgatgaacataaatgcaaaaattcttaacaaaatactagctaaccaaatccaacagcttatcaaaaagatataatctatcatgatcgagggggtttcataccagggatgcagggatggtttaacattcacaagtcaataaatgtgatgcatcacataaacagaattaaaaacaaaaattacatgatcatctcaatagatgcagaaaaagcatttgacaaaatccagcattgctttatgattaaaatcctcatcaaaatcggcatacaagggacataccacaatgtagtaaaagccatttatgacaaagccacagccaacataaaactgaatgggaaaaagttgaaagcattccctctgagaactggaacaggacaatgatgcccactctcaccacttctactaaacatagtactggaagtcctatccagagcaatcagacaagagaaaaaaataaagggcattcaaatcaataaagaggaaatcaaactgtcactgtttgctgatgatttaattgtacatctagcaaaccatcaagactccttcaaaaagcttctagaactgataaatgaattcagcaaagtttcaggttacaaaatttatgtacataaatcagtagttctgatacatcaacagtgaccaagctgagaattgaatcaagaactcaaccccttttacaataactgcaaaaataaaataaaataaaatacttaggaatatacctaaccaaggaggtgaaatatctgtaaaaggaaaactacaaaacactgctgaaggaaatcatagatgacacaaacaaatggaaacacatcccatgcccatgcatagatagaatcaatattgggaaaatgaccatactgccaaaagcaacttacaaattcaatgcaattcctatctgtattagtccattttcatgctgctgataaagacatacctgagactaggcaatttacaaaagaaagaggtttaattgagggtatggcaaggtggccaaataggaacagctctggtctgcagctcccagtgagaccaatgcagaaggtgggtgattctgcatttccaactgaggtacccagctcatctcattgggactggttaggcagtgggtgcagcccatgaaaggtgagcagaagcaaagtggggcatgacctcacccaggaagcacaaggggttggggaactccctcccctagccaagggaagccatgaaaggctgtgctgtgaggatggtgttatctggcccatatactgtgcttttcacacggtccttgcaatccacaggccaggagattcccttgggtgcctacaccatcagggccctgggtttcaagcacaaaactaagcggctgtttgggcagacaatagctacctgcaggagtttttattgtaccccagtggcacctggaacaccagagagacagtaccatttactcccctggaaagggagcttaagtgaggcagctgagtggtcttgctcagtggagtccacccccacagagcccagcaagttaagatcaatgggcttgaaattctcgctgccagcacagcagtctgaagtctatgtgggaagcttgaacttggtggggggaggggcgtccaccattagtgaggcttgagtagatggttttcccctcacagtgtaaacaaagcctccaggaagttcaaactgggtgcagaacccacagcagcatggcaaagccactgtagccagactggctctctagatttctcctctctgggcaggacatctctaaaagaaaggcagcagccccagtcagaagcttatagataaaactcccatctccctgggaaacaacacctgggggaagggatggctgtgggcacagcttcagcagacttaaacgttcctgcctaccagctctgaagagagcagcagatctcccaacacagcacttgaactctgctaagggacagactgcctcctcaagcaggtccctgacacccgtgccacctgactgggagacactttccaacaggagtttactgagacctcatacaggagagctctggctggcacctggtgagtgcccctctgggatgaagtttccagaggaaggagcaggcagcaatctttgctgttatgcaggctccactggtgatacccagacaaacagggtgtggagtggacctccagcaaactccagcagacctgcggaagagggggctgaccattagaaggaaaactaacaaacagaaagtaataatatcaacatcaacagaaaggatgcccaagcaaaaaccccatccaaaggtcaccaacatcaaagaccaaaggtagataaatccgcaaagatgaggataaaccagcacaaaaaggctaaaaattccaaaaatcagaatacctcttctcctccaaaggatcacaacaagggaacaaaactggacagagaacgagtttgacaaattgacagaagtagacttcagaaggtgagtaataacaaactcctctaagctaaaggagcatgttctaactcaatgcaaggaagcaaagactcttgataaaaggttacaggaactgctaacttgaataaccagtttagagaagaacatgaataatctgatggagctgaaaaacacagcatgagaacttcatgaaacgtatacaagtatcaatagctgaatcgatcaagtggaagaaaggatattagagattgaagatgaacttaatgaaataaagtgtgaatacaagattagagaaaaaagaatgaaaggaatcaacaaagcctccaagaaatatgggactatgtgaaaagaccaaacctatgtttgattggtgtaccttaatgtgataggggagaatgggaccaagttggaaaacacacttcaggatattatccaggagaacttccccaacctagcaagacagaccaacattgaaattcaggaaatacagagaacaccactaagatactccttgagaagagcaaccccaagacacataactgtcagattcaccaaggttgaaatgaaagaaaaaatgttaagggcagccagagagaaaggtcgggttacccacaaagggaagcccattagactaacagtaaatctatctgcagaaaccctacaagccagaagagagtgggggctaatattcaacattcttaaagaaaagaattttcaacccagaatttcatatctgaccaaactaagcttcataagtgaaggagaaataaaatcctctacagagaagcaaatgctgagggattttgtcaccaccaggactgccttacaggagctcctgaaggaaacactaaatatggaaaggaaaaaccagtactacccacggcaaaaacaaaccaaaatgtaaataccattgacacaatgaagaaattgcctcaactaatgggcaaaataaccagctaacatcatatgacatgctcaaattcacacataacaatattaaccttaaatgtaaatggggtgaatgccccaattaaaagacatagattgcaaattggataaaaagtcaagaaccattggtgtgctgtattcaggaggcccatctcacgtgcaaagacacacataggctcaaaataaagggatggagaaagatttaccaagcaaatggaaagcaaagaaaagcaggggttgcaatcctagtctctgataaaacagactttaagccagcaaggatcaaaaaaggcaaaaaaaggcattacataatggtaaagggatcaattcaacaggaagagctaactatcccaaatatatatgcacccaatacaggagcacccagattcataaaacaagttcttagataactaagaagagatttagactcccacacagtaatggtggaagactttaacatcccactgtcagtattagacagatcaaagagacagaaaattaacaaggatatttaggacttgaattcagctctggaccaagcagacctaatagacatctacagaactctccaccccaaatcaacagaatatacattcttctcagcaccacatagcacttattctaaaattgaccacataattagaagtaaaacactcctcagcaaatacaagagaacggaaatcatatcaaacagtctctcagaccacagtgcaatcaaattagaactcaggattaagaaactcactcaaaaccgcacaactacatggaaactgaacaatctgctcctgagtgactactgggtaaataacaaaattaaggcagaaataaataagttctttgaaaccaatgagaacaaagacacaaggtaccagaatctctgggatacagataaagcagtgtttagagggaaattgtagcactaaatgcccacatgagaaagtgggaaagatctaaaattgacaccctaacatcacaattaaaagaactagagaagcaagagcaaacacattcaaaagctagtggaagacaagaaataactaagaccagagcagaactgaaggagatagagacatgaaaaacccttcaaaaaatcaatgaatccaggagctggttttttaaaaagattaacaaaatagatagaccactatccagactaataaagaagaaaagagagaagaatcaaacaaacacaataaaaaatgataaaggggatatcgccactgatcccacagaaatacaaactaccatcagagaatactataaacacctctatgcaaatacagtagaaaatctggaagaaatagataaattcctggacacatacaccctcccaagactaaatcatgaagaagtcaaatccctgaatagaccaataacaagttctgaaattgaggcagtaattaatagcctaccaaccaaaaaaaaaaatagaccaataacaagttctgaaattgagacaggcagtaatagcctaccaaccaacaaaagcccagcaccagatggattcacagccaaattctaccaaaggtacaaagacgagctggtaccattccttctgaaactattacaaacactagaaaaagagggacacctctctaactcattttatgaggccagcatcatcctgatacaaaaacctcgcagagacacaacaagaaaataatatttcaggccaatatccctgataaacattgatgcaaaaatcctcaataaaatactggcaaactgaatccagcagcacataaaaagagcttatccaccatgatcaagtcagattcacccctgggatgcaaggctgtttcaacatatgcaaatcaataaacgtaatccatcacataaacagaaccagtgagaaaaaacacatgattatctcaatagatgcggaaaaggcctttgataaaattcaacacaacttcatgctaaaaacactccataaactaggtactgatggaacatatctcaaaataataagagctgtttatgacaaactcacagccagtatcataatgaatgggcaaaagctggaaacactccctttgaaaaccgtcagaagacaaggatgccctctgtcaccactcctattcaacatagtattggaaattctggtcagggaaatcagcaagagaaagaaaaaaggggtatttatataagaagagaggaagtcaaattgtctctgtttgcagatgacatgaattgtatatttagaaaatcccattgtctaatccccaaaactccttgataaacaacttcagcaaagtctcaggatacaaaatccatgtgcaaaaatcacaagcacatctatacaccaataatagacaaacagagccaaatcataagtgaattccccttcacaattgctacaaagagaataaaatacctaggaatacaacttacaagggatgtgaatgacctcttcaaggagaactacaatccactgctcaaagaaataagagatgacacaaacaaatggaagaacattccatgctcatggatagagagaatcaatatcgtgaaaatggccatactgcccaaagtagtgtatagcttcaatgctattcccatcaagctaccattgactttcttcacagaattagaaaaaactactttaaatttcatatggaaacaaaaaagatcccacatagccaagacaatcctaagcaaaatgaacaaagctggagacatcatgctgcctgacttcaaactatactacaagcctacagtaaccaaaagagcatggtactggtaccaaaacagatacgtagacgaatggaacagagcagaggcctcagaaataacactacacatctacaaccatctgatctttgacatatgcaggaaactgaaactggaccgcttctttacactttatacaaaaattaactcaagacggattaaagacttgaacataagaactaaaatcacaaaacccttagaagaaaacctagacaatatcattcaggacacaggcatgggcaaagacttcatgactaaaacaccaaaagtaatggcaacaaaagccaaaattgacaaataggatctaattaaactaaaagcttctgcacagcaaaagaaactatcagcaaaattaacaggcaacctacagaatgggagaaaatttttacaatctatccatctgacaaagggctaatatccagaatccacaaagaacttaaataaatttacaagaaaaaactaaacaacttcatcaaaaagtaggcaaaggatatgaacagacacttctcaaaagaagacaacatttatgcggccaaaaaacatatgaacagacacagagccaaaccatcactggtcattagagacacgcaaatcaaaaccacagtaagatgctatctcatggcagttagaatggtgatcattaaaaagtcaggaaacaacagatgctgaagaggattggagaaataggaatgttttacactgttggtgggaatgtaaattagttcagctattgtggaagacactgtggtgattcctcacagatctagaaccagaaataccatttgacccagcaatcccattattgggtatatacccaaaggattataaatcattttgctataaagacacatgcatacgtatgtttattgcagcattattcaccatagcaatgacttggaaccaacccaaatgcccatcaatgatacactggataaagaaaatgtggcacatatacaccatggaatactatacaaccataaaaaagaatgagttcatgccctttgcagggacatgaaatgaaaccattattctcagcaaaccaacacaggaacagaaaaccaaacacgcttgttttcactcataaatgggagttgaacaatgagaacatatgggcacagagaggggaacatcacacactggagcctgtcaggggtggagggctaggggagggatagcattaggagaaatacctaatgtagatgacgggtagatgggtgcagcaaactaccatgacacatttatacctaagtaacaaaccttcacgttctgcacatgtatcccagaacttaaaggataattttttaaaaataaagaaaaagaaagagctttaattggactcacagtttcacgtggctggggagaatcatggcagaagtcaaggagaagcaagtcacatcttatgtggatggcagcaggcaaaaagagaatgagagccaagagaaacaggtttcctgttatcaaaccatcagatatcatgagacttattcactaccacaagaacagtatgaaagaaaccgcccccgtgactcaattatctctcactgggtccctcccacaacacatgggaattatgggagtatgattcaagatgagaattgggtagggacacagagtcaaaccatattattccaccactggctcctgccaaatctcatgtcctcacatttcaaaactaatcatttcttcccaacagtcccccaaagtcttaactcgttcagtattaactcaagagtccacattccaaagtctcaactgagacaaggcaagtctcttccacctatgagtctgtaaaatcaaaagcagattagctacttcctagatacagtggaggtacaggcattgggtaaacacagccattccaaatgggagaaattggccaaaacaaaggggctacagggcccatgcaagtccaaaatccaggggggcagtcgagtcttaaagctccaaaatgatctcctttgactgcatgtctcacatccaggtaatgctgatgcaaaatacgggtatccatggtcttgggcagccctgcccctgtggcagttccacatggctggagaggcctcagaatcatggcagaagtcaaggagaagcaagtcacatcttatgtggatggcagcaggcaaaaagagaatgagagccaagtgaaacgggtttccccttatcaaaccatcagatctcatgagacttattcactaccatgagaacagtatgggagaaactgccccccaccaggtgcctcccacaacacgtaggaattatgggagtacaattcaggatgagatttgggtggggacacagagccaaaccatatcaccatcaaaataccaccgtcatttttcacagaactagaaaaaacaatctgaaaattcatatggaaccaaaaaagagcccatgtaaccaaagtaagactaagcaaaaagaagaaatctggtggcatcacatcatctgatttcaaactatactataaggccatagtcactaaaacagcattgtactggtataaaagtagacacatagaccaacggaacagaatagagaacccagaaataaacccaaatacttacagccaactgatctttgacaaagcaaacaaaaacaagaagtggagaaaggacaccctattcaacaaatggtgctgggataattggcaagccacatgtaggagaatgaaatgattctcctctctcaccttatacaaaaattaactcaagatggatcaaggacttaaatttaagacctgaaactataaaaattctcaaagataacatcggaaaagcccttctagacatgggcttaggcaaagattttatgaccaagaacccaaaagcaaaggcaacaaaaacaaagataaataggtgggacttaattaaactaaacggcctttgcacagccaaaggaatagttagcagagtaaaaagacaaccccacagagtgagagaaaatcttcacaatctgtacctctgacaaaggattaatatccagaatctacaaggatctcaaacaaattagaaagaaaaaacaaactatcccatcaaaaagtgggctaagaacatgaatagacaattctcaaaagaagatatacaaatggccaatgtgaaaaaatgttcaacattactaatgaccaggcaaatacaagtcaaaaccataatgcaatgccaccttactcccacaagaatggccataatcaaaaaattaaaaaataatagaagttggtgtggatgcagtgaaaagggaacacttcaacactgctggtgggaatgtaaactagtacaaccactatggaaaagagtgtggagattccttaaagaactaaaagtagaaatactatttgatccagcaataccactactgggtgtctgcccagatgaagagaaatcattatgcaaaaaagatacttgcacccacatatttatagcagcaatttccaattgaaaaaatatggaaccagctcaaatgcccatcaatcaatgagtggattaagaaagtatgagatatatctcatattttctttatatatatatatgaatactactcagccataaaagggaatacattcataaattaatggcatttgcagcaacctgaatggaattggtgactattattctaagtgaagtagctcaggaatggaaaaccaacaatcatatgttctcactcataagtaggagttaagctaaggggatgcaaaggcataagaatgatacaatggactttggggacttggaggaaagggtgggaaggggttgaggaatgaaaggctacaaactgggttcagtgtatactgtctgggcgacaggtgcaacaaaatctcacaaatcaccattaaagaacttatccatgtaaccaaataccacctgttcccccaaaaacttatggaaataaaacaagttaaaaaagaaaagaaaaagatgggggaaaaacaagacaaagacaatcaaaataccttaccaacctaaattccagataagaaaattttcaggagtattcttccaaacaagcctcctattctccattcaattgggcaggaatttccccacgccaggactctttctaccacctaggaagagccaaccaagatctgtcaagggggcacaatgcctccacaggggccaccagatcagaaaaagaaaaagggtgttgtttgcctttagaatacttatcaaaagacatcgtccagtcccagaaaatgtttccccactgcaagcaagtccaagtaccatggactgaccatccacccaccagcaaggattgtgccagaggtggccctcagtttaagaaagctcacctccagggccagtgcaccagtgaagggctgccaaaccatggccacgcacctacaggggcaatctcaaatgatgctccaaatctgttacaatccagtgggtttttcttgcccgctgcacagaaaatgccaacacactgagacagaaggtattgcaacagagaatgagcttaataattgcaggaggctcaagcaatgaagacaggagatatttctcaaatctgcctacctgagaatttgaagactagaaattttaagaattgtttggtgggcaggtggctaggaaatggacactactgactggttgggtcagggatgaaaacacagtggtgtgaaaactgtcttgtgtgctgattcagttcctgggtgagggtcacaggaccagttgattcagtttcttggtatgggtcattggtccaaatagtgtcagttgctccaccagaacgaaaagtctgaaaaatatctcaaacaccagtcttttttttttaaatatactttttattatactttaagttctagggtacatgtgcacaacgtgcaggtttgttacatatgtatacatgtgccatgttggtgtgctgcacccattaactcgtcatttacattagatatgtctcctaatactatccctcccccctccccccaccccacaacaagccccggtgtgtgatgctctccttcatgtgtccaggtgttctcgttgttcaattccaacccatgagtgagaacatgcggctcaaacaccagtcttaagtttcacaatagtgatgttatctataggagcaaatggagaaattacaaatattgtgactatcagctgactgactcctgagcaataaacaattattttaaaaagcaagcaaggtagggaatgatgactgcttactgtttaactatgcctacatcttagcagaattcaggccactctgataattctaaccttgtgacattcatccatttttcaaaggtagtttctgttcctgaataaggaagggtaggttaaactataaactaaattcctcccacagttaggctgtcctacatacagaaataagcaaaggcagttagcttgtgaatataaaggcaagatggagtcagttatgcttttttctctcacttttataatatcacgagcatagttttgtgttcagttctctgtcagtggtagtggtcatgacatgggctctggagttaggtacacatagtttctattcccagatccaccaccaatcttggaaagttacttcacctttctgaagatttgtatccttctctgaaataacaagatattgtggttgagaggaataaataaaataacatctgcaaacccactcttattcctgagatcctctttaaaactagcatctacagtggtaacttacagtgattccctcggtttatgtctctctttgtctctgttttcctaaggctgaatgcttccaagtactcacctgaatcctgcctctttagtgaaatcttttccaaccattcctgaaccagctgatcctatccttctataaattatttctcccatatgtcaacatttaattatgtgccattcctcttggtgagacactatagagaggtttaaaggacattggctgtgtgatcattgagggataattgagtaaatttttttttagtgctcactgagtgttagagctgccctctctttttttcagctgttgctagcagcagtcccttctgcaccagcagcatcagaccctggcaggcatgtgaataccttagggattgctcttgtcagggtccttcctgcttctggattttggttccatttgtgtttccttttgcatgttattcaatggcctcttgtgttattgtgaaatacagattgaccgtggcagaatttaactggaggacacccagccagtgtccactgcagtactgattgctcacttggtggtggggaggaacacccacacccatatttggtcaaagaattcttctgtgttgatgatgtggtgtgaaatcagataaaatgggttttagagtttttctaaatattcctccaagggagagattgttgacatttatttatgaaaacctcaagataataactctaaggaagttgagcacagtatcctcttgcttaaaaagcctggtgataggaattgtgttcactttcctaattcatgaaatttaaaatagggtctttcctctcttacttcagaagagatgaaggacaaaagaccagatggggaggacaaggttgtttatggggaagtcatgtacctctgacctggattctacgatgttcattcaatcatacctggaagtgtgcatctttgcatgtgcagtcatatatttctatcacatgactcataattccctccctgtcagtggcaattaggagctcatgtaaagcttaggacagtaaaattatatggtgtgttcttccactgcaacaaggtttctctgaggtttaaggaaacaataggacaagagggctggacactttacctggtgtcctgccttctttttttattgagcagcagtctactcacccatcatttttgaccttcctgttttcctaccatgggttcagatataattactgatgtccagatacaattacttgtgcctggagcttgatgttattttttaaaagagaggcctgaggaatggtttcctagctgatttccaggattctaattttcactgtctaagtcgttggttttcaaccctggctactggttagagtcaccttaggaatttaaaacatacaaatgcctgtgtcttcctcaaagagagtctaatttgattgctccatggtgtgccttgggatttggtcatttaaaaatgcttccaaggaaaatagtcattttacagtggaggaactttagcccagtgctcaaagttaacatccccaataatcaaagatatagaaattctgggcatcctaatatgatggatggagaaggtgcagcatcgcctctgtggcatttttgcccaaagtggataacctgagtttaattatgagaaaatattaggtaagcccaaactgagggtcattccaccaaataactcaccgatactctttaaaaatgttaaggtcatgaaggcaaaagtaattctgaggaaccatcccagattgaaggcgattgagaggacagaataatgagatgcagtgtgtgatcttgtatggatccttgtccagaaaaaggatattagtgggaagatggagaggatttgaatagggtctgcaagttcattcattgtaagatgtcagtgatcatttactgatgttgatgattacactgtggttatctataacgttaatattagggaaagttgaacgaaaagaatatggggactctgactatttttggaacatttttggaagtgtaagattatttcaaaatgaaagttataaaaaagaagggggaaaaaacttccagataatcctgagttcccagagttgaagaccacttgcctaagttatcttgcctaatactgtcagagtaatcttcctggaaatgctttttgtgatgttactgaccttctcaaagctttccagtgactcttatcatctataggatgaaattccaatttcttaagccatcattcaaagtctccataatatgaccccaatctactcccttgatccacatttgactttctcatgtctaaatattttgcaattatttgactccttcatataacatgcatacctgcctgttcacctcctaaattgttcttcatcctaaggcttatttcagtccctgtctcttcattgaagcttgtatggttatttctgttagaagccgtcatcctttgtttctttgaattctggaaggtacaatggtgtggactgaaacataagctttggattcagaaatatgtgagtctgaattctggttccacctttcaccaattctgagataaaagacaagttagtgatgtcttgggatagagggataatagtacctacttaaagggtcattgtgagcattagatgaggtgcaaacacaaaggtctccagcacataacagatttcttcctcatcatttttgctgctcaatggtccccaaaggtattatgggtgatgcaaaggcttttatcaaaattttctgcagcaccttttaaaaagtcttgtgcctggccatcactaagatgagagacacccttgaactgaactgaatgtatgggactttaaaaaactcaaccgagatttgtttttcctggaacacaactcagtaaacaagtggatagaaaaatgtaacccaacagagggagaagggaagcgcaatggtttcatataacagccatgccttcttaggaaaaagctgtgatgccttctgagagtttgctctcagtcaggcaggatcaaagaagtacaactccttagtacaatcccttaaaccgtgagtcctgcacagcacctcactaatccattccctgcccaggtgatgtgtgcataggtgaagagtcagatctccataagtcagacactcttcccccttttcagctccctgaccctcactactgtgtgctctggtctggccccagctgccaggccattagtattggtctaagaaagcaagaccaggacgggcagctgagaggaaagtcagaggccaccaagcatgaaaagagagagatgaggctgtcattgctcaaagtcacccactctgggtgtgttttatgactgtttctggattttggaatattctcccctttgtgatcattccagggactcaccctcctcctatttccttctcattgcactttctgtccccagtgcaccctttttatggccagagactggctgtatgactagatgacaattcagtgaaagttacttgttgtgaggactgagagccaggcccaccctgctttttcccagaagagactggaggttcataaaagccagctttaatgcagggctgtgcaggtgtgagtgtggtgttagggaacaggtgcaaaagtgaagagtgagacagaaaaaaaagatgctggctgttcatcaaatcctgaaagtagagggagcaaaaattattctggaaggtggatgtcattcaggagaccttggaagacctagagtgtcctctgcacaaataaagtggaggatggggttaaattacggagttggatgacactcattacctgacttcacttctctgcctcagttttttaaatctgtaaaaatggggatgctgacactcaggattttttatgaggactgtagctacctgaaaaccccttaggatagtgcctggtgagtagtgagtgctgcgtcagtgtgagctattatagttatggaaataggcaaaggtgccatcaggagcattcagagtgaggaggtgccttccagtcagggtcctcgcaggcagctggagatgaagatggttaagggggcttaaactccacagtggaaggattgaggagcagtcctgagaaggaattcagaagccaacaggcatggaaagaggccagggggactgtcattgctcaaaggccacacactgtgggtgtgctttatgactgttactggctttgaaatcttctcccctttgtgaccattccagggactcgccctcttcatatgtttctggatttggaatcttgagcaatattcatgacgtacaacattctgtgaaaaatacctttacccgacagcaggaacagccagagtgggtgtggcttctgtcacaaatattgtctcctaggagtctaggaatgtgtcctaagatcgaatggttttgctgaaagccaagcctagaaatgggcttcaggggcaccttgtgaatagcatttatgttgccaatggaaagcattcatctttttaaaggaaagcattcatcttaatgaagaaatcccatcttatggtctgggtcagtattttttgcctctgtactatccttatttataaattgaaaagagaaagaccgaagaagagtgacataaggaagcacatgtatgaattaacaggacagaaatgggactagtatgtgtaaattaagggaaagcatgtatatattttatgtgaacataaaaaggacttcttgttggccggcgtggtggctcacgcctgtaatcccaacactttgggaggcagagacaggcggatcacgaggtcaggaaatcaagaccatcctggctaacacggtgaaaccccgtctctactaaaaatacaaaaaattagccgggcgtggtggtgggcgcctgtagtcccagctactcaggaggctgaggcaggagaatggcgtgaacccgggaggcggagcttgcagtgagcggaaatcgtgccactgcactccagcctgggcgacagagcgagactccgtctcaaaaagaaaaaaaaaaaagaaaaagacttcctgttttaaacagacttctgtgtaaaaataaaaataatatacactgccttgagtggagagcagactgcaggaccaaaacattccagcagagtcatgagagaatgggttgtgtggcttctttgctaaatagtaggttaaactgagtatgttactgaagagaaaggagatgaaggagaagataggtgagggtgagagaatgtgagatggcaaaaggaaaagactgaaagaaaggtttactaagggctcatcaggtaccaggctttatgtctaatgccttccacatattaacgtacccattcaaactgtcattttctgatgcagtaagagtgactcttgtgctgcagatgagaagaggctgaagtgggtgaagtgagtggtccagagtcatccagccagttcatagcagagctagtgtgtttcacctcgaagtttgtgctctttgtgattcagacagaaaagtgagacacagaaggaaggcaaagcaatttttgttgtgggtaaagtttacagaagttacctgtattaggcagaataatggcctcctaaaaatgtccacatcctaatccctggaacctgtgcatgctactttatttggcaaaagaaaagactttgcaggtgagatgaagttaagtttcttgagatgcgaggttattctggataatttgggtgggctcagtgtagtcagaagggtccttgtaagtgaaagagagaggcggaagggtcagggtgagaatgatgcagccagagagactccactggccatcgctggctgtaaacatgcatcaaaagacaaaattataacaaattcagttatagatacaattggcttttatttgtgattcatgagtcagggcagtttccattctgcaaaatatagtgatagctcctactgggcaatacaacagtagaacagtgggttttgtaaaatgggaatccaggaacagaagaatataaataaattgatttaaataaactgattggttaatttcagaatacttcatattacttttttctaagagttaaagcagaaaggactttcttactgtgctgactcagacagcctggactctcatgtttttaggaaaattttgtctgttctgggatctacctgcttcctcatgtttcagtgtgagtatatggcatttagcatgactggctccattctggagtcaccaggctgtcacctaaatgagagtttgactaaacataaggcattaacactactgtcagttaccatcattttggacttccatcattcataggttatgatgtcctcctaatcatacatttatttgagtttttgtcattccagccaaagagagaatatttgacatttgacgaatggctgcatgcaaacatttaaaggttttagagaatacagcacaccagggtaactaatattgtgacaatcaggaggatcacaccaagagtttgaagtatgatccataggcagagaccccatgaaccaaaccaaataaaagagaatagattaaagaatgagccacatgagaagcctacccattttaatcaagcagcatatttgttaatttttgcaactgagtctctatagtacccactgtatttatttatgtgcaacaagaagtgtcagcaactgcacaaactcctccctgttcagctagtaggcagcaattctgttatctggcatcccatagctgggttaaattaaaacagggcgtgagaacaggtgagtctagaggtctaactctaacagggaccaccgtgcatttgaataaacagttgtattagggatgttgttaaagttagccactgggcagaataaaggatcccttaggtcaaatatttgggtttgacatgatgacatgacacatccaacactctgtcaaattacctgcacaaggcgctgattgtgaaattctagttacagcattatcttaccaaattaaagaggcaggcatgagcagggaaaaatggagtgggataagagcctcgtcacgatgaggcttgggacatcttgggaaaaactgtccacagcatgaagtcatcaacttcttgtcctggttggcaatttgagtgtctctagttatggtgttgaacattttggttagctctgagtggcccacatctcaggcatgagggtttttccttgaaatttacattgagttgtccacctccagcttataggtcttcaggaagagagcaggtcttatacttagtgatgccacaggagaaaatgggattgaaggagctagaagaatccagtccagtctgcaggtggataataaaaacttgaaaacaaaatacagggctacaatttgataacagttgtattatagtctttcctctgaacataatttttctctatctctccctgtttctaccaaagttaatcagagtaagactaatctgtttacaaaataggtagagtctcatcaaacttggtctgattctttatataagaagtatagcaagaatagcgattgaccacatagcatctttttaagattgctttgctggaaggtttgataaggaatctcagattaaacttttagaaacctctcagcactaggaagccaaaccaaggctgacttcagactttgcctgcagtacctcagtacctacgggttcattctatgtatatttccaaatatgacatcccagccaaagccttggtaatataaccagtatttttaaatgtatcctgttataaacagaacagattcttattgaacttatgcaaataactattttcataacaatgtgaacacccatgaatagttgcctgattctggatggaaaatgtagggagaaaaattaatgtttcaatttttgttcacaagttgtattttaccaagtttctgtaagctatagatagcttaaaagaaaaatattccttcaaatttggaaaacaaaacatttaaagaatcatcaaaacttcaactaaaaattcataaaaacattatcctcattagttcatctagtcccatgaaattaattttttgttctgcctgatcttgattggcagtttcatgaagatatctcttcattaaagttttggaaattcttagcccaatggtatgattctaaagttatcagaaacttgtattcaagacaacttgtcagagtcttagccataaatctccttggaaaacaagcagttttggactgtaaccatttccaagtgcttttagagaagaatcaaaacaactgtctgtgaatgacaaagacttaagatggcaatggttaaaaatctgataagacttcagatttgatagatttgatgataatgacaccactcacaaacaaatttggttatttctgtggcatgtaacactatgactgacaaaatattagatttctagaaatctcatataatttttgaaacattcacatcaataacatacccgcaaatataacttagagaaggtttggcatcacttgtcatttgacagtgttttccatataatttaacatatcaattaaggtgaatttccatctcgcttctgtttctcaactggattactgagttcagggcatagtacattaacaaatatggccaacaatgtataagcttatgtatgttgaaaaagttccccaggtaattttgatacatacccctagctacaaaccattgatttaagcccaagtcctgcttatcagagcaggggttctgcatcctgcttgcacattagtagcatgtgggaaggcttaaataataacgccttggtcccactctagaccattaaatcaaaatgtatgagcagagcctggaaatcagttgttcttttaaaaattttccagtgattccagtgtgtagccatatttcccattagatttctctttcttcttgtggaatttatctttttctattttggtattacaattatttttcatgtcttattttttggagacagggtcttgctctgtggcccaagttggagtgcagaggcacaatcatagctcactccaaccttgaactcttgggctcagaggatcctcccacctcagcttcccaaagcactgggatgacagttgtgagccaatgcacctggccctttgtcttatcgtctgtcttaggctttatgttccctggagtagggaccttgccttcttcatttctgtatctttcatgaacacatgaattggttatcaggaaaagattctcagccacgtttaggttgtgtcctgagtctcaggttcacatactaatgctaccgtctttgtcctccacaaggacagaggttgcttgtgatgaagggtgtgggtaactccacaatgcaggtggtggaggaaggttaccttgtttttagatataacattggaactaagaattctatgtgtacatggggtggaagggcaggatgtataggaagacagatctaattaggatggagaaattatactcaggagtagtggtaaaggaagtaaaaaggattcatgaagagaagaaatgtgaacttatctaatgggctagagtaggccgctgcaggttcttcagtaggtgattttaggaaggtaatgaagtagtcatatgctaggaagcattcagactagagaaaagaagtcaagcaggacttcaagcagttgttgaggtttatgggaatggagagaacagcacaagtgaaagatgttttaaaaaggaccaagaagctttcacaatgtattgaattggggaaacaaatgagcagaggctgggagtagtcatgtctaagagacagtggagtacaggaagcatgaagaccagggaagaagagacctgcaggaattagtgcttagaagcaggagtttagtgggaggaggaggagatctagtcccagatacaggtgaagaagtcctttccctctcccaagcatggcagtcagccctgcaggaaataggataagaggaaaggtcataatacctaccactcttcccgaaatgcagaaactacaccaaggctgctatatcagagccatcccagccagtactccaatcatgatgctgacagcggtcccagctgagaggtcaggtgaacttgcttgtactgactcatctgccatggaaagaaaagagaaggaatgaagttgatcttattttacagggaagtcccccaggaaccaactctcagcatgaagtcgtttctatttgttccttcaaggaatacattatttttgtgggaaggttgctgggagatgattatccaactaaattcttgcaggttttttatctcaccaggtttccaggttgatggtcagtcttctgtcaattccatcctgacctttttacactcagatatttttgaaggctttgaaatttgagaaagactgattgctaatcttgtatgtcattaaaacttcccactttttcatggttgcattttttttcttagtgtctcagttgtggcagttagtgcattttgaattcaccacctcctttgcacagagacctcacttcccatgggctcccagcaggtgtgtgaaagcaagtcaagttctgcaagactattttgctctgaaaggtgatgggcttgaggaattcccaacagtcttgcagaaactctcttcgaactgcactgcaatctaaaactttcttttttttctctttctcctccacaggcatcacatctgcatcatgatctgagggctctcccaggctcctccccctcccagcccactttccctcacaggtgtttttccctcaaaattatattgcatgtctaatcccatcttgactgcatctctctgaatgaaaactaacatactaggcttgagacttcatatttaactctgttcttttccctctcccatattaatcagtaaccatgtcccagtggactttttgtgtaatgcctgtttctcccatgtatatgtatatgtatatgtatatgtatatgtatatgtatatgtatatgtatatgtgtgtatatatgtgaatatatatatgcacatgtatatataataccttctgcatctgtttcttctttatttctgttgcaataatttgggcttaatttctcatcagtcatcagtcaactcagactgatgattaataatcactaatattagctactgttgaggggtgcttcctatgtgtcaggccctgtgttaaattatttacatgtatctcatttgagctgtaaaataatactgtcaggtagaaaatagaggtggcttagagtggtgaaaaaacttacccaatgtcatacagctagtgacaggcggatctaggatttgcctctaagactacctgacttcaaggctaataataatggtagctttaacagcagctaacatttatgaaacagttcctctgcatgtggcattttgctgaatgtttcattgattattacattaaatcttcaaaacaatactgtgaaacaggcactcttattgcaattttcagttgtggaaactaaggctcagagaagttaagaatcttgtgcaagaaatgtataactataaatacatacatttaaaaagaagaaagatctgaaatcaacaacctggctttacaacttaaggatataggagaaaaacaaatgaaacccaaagttagccaatgaaggaaataataaagattagagtggactagaaaaacaatagagaaaagcaatgaaaccaaaaggtggttcttcaaaaaagttcaacaaaattcaaaacctttaattagatcgactaagaaaaaaaatgagaagatagaaattactcaaatcagaaatgaaagtgattactaccaattttacagaaatagtaagtgttatgagtattatgaataattatatgccaacaagttagagaacctggatgaaataaattcccagaaacataaaaccttccaaatggaaccatgaagaaacagaaaatctgaatagactaataactactagggagactgaaccaataaaacatttgtcaaaattcaacattctatcatagtaaacacactcagattataaatagaaggaaactacctcaaatataataaaggcattatctgaaaagcccaacgctaacatcatactccagggagaaagactgaaagctttccctctaagataaaaacaagacaagaatgcctagttttaccacttctattctatgtagtattgaaagttctagtaagagaaagtaggcaagaagaaagaaaataacatccaaatcagaaagaagtaaaattaactttgcagatgacaggaacttacatgtagaaaaccctagagattaaaacaaaattttagaactaataaacagattcagtataactgcaagatactaaatcaacatgcaaaaatcagttgaaatcagctgtatttcttttttcttttttctctgtctctttctctctctctctcttttttttttttttttttgagacagagtctcattttattgcccaagctgaagtgcagtagcatgatctcggctcactgcaacctctgcctccccagttcaaatgattctcctgcctcagcctcccaagtagttgaaattacaggcgtgtgccaccacacctggctaatttttttttttttttttttttttttttttttagtagagacagggtttcaccatattggtcaggctggtctcgaacttgtgaccccaaatgatctgaccacctcagcctcccaaagtgctgggattacatgtgtaagccgttgcatccagccaaaaaacagttgtattcctatgcacttacaatgaacaatctgaaaagaaattaagaaaaaaattgattcacattatcatcaaaaagaataaagttcttaggaatatacttaaccaaggaggtgaaaaaattgtaagctgaaaattataaaatgcagctgaaagaaattaaagaatatattaataaatggaaagaaattccattttcatagattggaagacctaatatcattaagatgataatattaatgcaatccctaccagaatcccagtggcatattttgcagaaatagaaaaatcctaaaattcatatagagtctcaggactctaaatagccaaacaatatgaaagaatgaagatggaggactcacacttcctgatttcagaatttactacaaagccacagtaatcaacacagtgtggtactggcataaaggaatacatagaaaccaatggaatagaatggagagcccagaaacaaatgcttgcgtttatagtcaaattatttttgacaagggtaccaagaccattcaatagggaaaggatggtcttttcaacaaatgatattgggacagctggatatccatgaagaaggatgagttgaatctttacttaacaccatataaaaattaacaccatataaaaattaacccaaaatggatcaaagacctaaatctaagagataaacctataaaactcttagaagaaaacatagggggagagcttcatgacattggatttcacaatgatttcttggctatgacacccaaagcacaggcaacaaaaaaaaaacagacaaatttgacttcataaaaaataagatcttctctacatcaaaggacattatccagaaagtgaaaaggcaacccatggaatgggagaaaatatttgcaaatcatatatctgataagggattaattctcagaatatataaagaactaatataactcaacagcaaaaacccagaaacccaatttaaaaatgggcaaaggactaaaacagagatttctccaaggaagatatgcaaatggccaataagcacatgcaaagatgctaaacatcactaatacttagagatatgcaaatcagaaccacagtgatacaccaccacacacatgttaggatggctttgatttaaagaaaaaaaagaaaacacaaaacatgtattttgaggaggtgggaaaattgaaactctcgtgcattgccggtgggagtgtgaaatggtgcagccacagtggaaaatggtagagccgtttctcaaaaaaattaagcaaagcattaccatttgatgcagcaattccacttctggtcatatgcccaaaataatggagagtagggctttgaaaagatatttatacacccatgttgatagtagcattactcacaatagccaaaatgtggaaacagctcaaaagtccaccgaacgataagtcaagaggcaaaatgaaatatatccacacaatggaaactcattcagtcttaacaggtaataaaataaaataaaatgccgagcatttacacactcatgagactcaaattctgatacatactacaacgtgaatgaaccttaaagacgttatgctaagtgaaatgtggccagacacaaaaggacaaattttgtatgagtctattgatgtgaggtacttattaataaaatagtcaattacagacagacagaaagtagaatgatggctaccagggactagggttagaaggagtggagagttactgtttattgagtgcagaggtttagcatggtgagttgaaaaagttctggaaatggatagcggtgatggttgcacaacagtataaatataattgatatcactaaaccatactttttttggagacagggtctcactctgtcaccgaggctggaattcaatggcgcaatcaaggctcactggagcctcgacattctgggctgaagtggtcctcccgcctcagcccaccaagtagttggaactacaggccatgtgccaccatgtttcgctaattttttgggaagacagtgtttcaccatgttgtgcaggctggtattgaactcctgagctcaagcgagccacccatctcaacctctcgaagtgctggaattacaggaatcagccaccgcgcccagccctaaaccgtatatgtaaaatggctaatatggtaaatttcaggttatgagtgcttaacctttatgaatatatagtggctggtactcttatcctcgctataaatacacactttgtggccctgccccttccctcccttgcagagtcccggtggctgaatctccctatttgtccaaatgttcatccctagctgtgctctgtgctgtgtccacagcgtcatacagcgggtgacttcagagccaggccacagttcaagagtctgccccagggctccctctcttcccagttccctgaagcctgacccaggagaggctctgccattgattgacagctcaatttagccagattcaggacaggtcgcccaagcaccttctccacacacccaggtcccaccccaggtggagtcagggcagggccagtcaccaggtgagccggaagcagagcagggagcagactctgagctgctcctccctcgtccaaggggtttcctcctctcatctggggaaaaagtgtgagatgtttcaaagcttccttcttccttgtagctcatgaattaggcaaaagaacacaaagaggtgacaaaaagggacgtattgatgaccgagagaacccttaaggacccttcctgcttttccctctgtgaagctctttccactacctggggctttggggctgagggagccccctccccacattccaggctggatccataatcagccatgagaaattactgaagtacagggaggagggtctgcagagacagagtgagagggttcagcggggagaatttgggatctgcttgtgcccatgggacacaggctggaaaagaaaagttttttcagctcttccttaacaccagagagaccccatctcaaaatatgatgccaacggtccagggatccatgtaccacggactgtgatcatcttgactgtggtactattgcggtcagtggccaatttgtgggcatagcaggtataggatacactattctttgcagtgctttggggataaagagctcttgcatgtgttgcagaaggtttccattactcagccaaaaatacggagagggtgggttagaggccacatggatgaagagtctaaggtttgctcctaactcgtaagatataactggggtagaaggggtgtccaagccacccggagcaaagagaataaagccgtaagtgatgtcctcagagggaagcggaagctcctggtctgtggaagggctgcactgtccctcttacccaaatcacaatcctgaagtcccaaccaaaccccgatgtgttcactgagcctgagacattcacctgtttctcccatcacaggctgtggaccctgagcctcccaggacaggagcagcccctcctctcatattcttggtcaaggctgggtctgcccaggtttgcttgtggcagaaagtcatggccagcctgggtgcctagaggtgagggtctgtgtacttggacctgagagggactaagaggcctggtctctggctgcatggatttgggctgtcagcctgggccacagaggaacagaagatactcacagcggacattcagggtgactgggtcactgcggctggcacccactgggttctgtatttcacattcatagggtcctatgtcattctttgtggcgctgagtagaacgagggtcctgttgtcagtggagagcagcagcctgggactgaccaggaggctctgattgtttacccaccacaggtaggttgtgttctgagtctcaggttgacaggttaaaaccacaatatctttgttctccaccggattgaagttgttgctggtgatggagggcttgggtggctccgctgtgcagataagagagagaaaagattgccctgtgtggccccttggttcccccacggacatctttcaatcagagttggcatctcccacctctaagcccactcaagtccttaaaagcccacagaaggtgtgtgtatcacaagacagatgcacaatgatctgagagctcagacactgtgaggctgcctgatttgtcttagagaagcacagactttctcaagtgtaaattgtgcagcagcgttggcccatggacagacccaggaccatcaatcacagccactggtgcctctcctggtcctttcctgatggctgcctacctggccctttggggtcctcacctcgaatgggcaggagctgagttccttccagctgaacactcctacaccacccagccaaggggtgtttctctgagccttttttttccaaggatatcccagagatgggtgatgataacaatgggtgtttgagcagacatagcagaggagaccaggaaaaagtctagaggtgagtttagtactcagactgcagggcctccaggtggggcagctctacccgggtgtttgatggtgactgacaagagctagtgaccgccaggaaagtgcagcagagtccagaagaagatagagaaagggtgagtgagacaagcaggggctggctgaaaatctgaggattctcaatgacataacaagaacaatgaagacaaattaggagaagagatgtgtgttatgttaggaaatttacaaagagctccctgtccccagctcctgtgcagtcagcaaaatggaggaaatcccaacacaggcatgagaaatgctttcttccttttctctcgacctacggaaacacaacaagagtttgatcaaattcatctaaactaggcagagtctaagtgagatgccagtggctggtgcagttcccattccaagggaccccaccttatgacaatggtgtcatcatgaggacacaggtgtatgcggaatggacagcaaacccatcagacagcacctgcctaggccgctgcacctggaggaggtcccaggaatgactggaggaccttagccccacagcgagacgaggatggagttggtagtaaaatgggtggaatgaacccatgggctttggggactgcacacctgtcctgcctctggccccctggtgagtcagtgtagagagcagatagaggagttgctcatccctgtcccatggccaagcatttacacagtcatgagactcaacacctgggtggcttcttttttttttaagatccagggatcttgctatgttgcccaggctggtcttgaactcctgggctcaagacaccctcctgtctcagtctcccactggggtggctttaggggcaggggatgagagaggtggaacatgggtctcagtcccttggagggacagggaacaggtgccagagcctcctaggatcctgcatcaggttccagtctctgaagagattatggatcattcattccttcattcattccctccctccttcatgagagaactactgagcgagtgtgtttctcactttgggccctggcatgtgcagggtgtgagtggggagagaaagcaaagtcttctcctttatcctcctgtgggagtgacaccaacacatcaggaaacacaggatttcaggtccagtgagggtaggagtgtgaatctaagggagaggcctggacattcccagcactgactctgatagttgaggcaagagattcagttctaggtaaaaactaattctctatttgttcctcactccctagaccagaatctcccacttctggcttggatgcctaggaagcaagctctgtggctacaaagacctggggactctgatgtgactgtccggtccgtgagaccctgcctcagtggctgtatttccttctgcctcagtttcctttaacaaaatgagataaagcgtaaatggtctctggcttgccttgctgtctgtgaatttaccttaaaataatcacaattacctggatgagagccctgtgtagaagagctgcccaaacaagcaggatctctgattgtttgcctccaggagtgggttatttggacctgattcctggtgtacaaagaacttacagcagaaactttcttcttctttttctccccctgaggacactgactcccctaggacctctcttaagttcctcatccagggggactgaggtcctagtaatcctgttcatctgtcctctccaggctgagtctcaggtgaaggatgaggctctgtccttgcccagatgaggccctgggggtgaccaggctggtgaccagctccatgagccatgatcctcaaacagctcaaatccttgctctcagtcagttcagcccaggaggccacaacccagccctgacacaggttccttagggtcacctggagtcaagagccctgggacagggatctgggacttgtgcttccagggctgagcttctctgtgaggattccaggggactcctcaggccaggctctgacccagttctccagggtctttttcagggggagggcacagaatcttggctgagactgatctccccctgctgagtgccccccatcagactgtccttcctctgcagcaagtatctgcagggtctggatgcaggaaagggattctggtctgtagaagtttgtctcccccatgtgtgtccttcactaaatgcccaaactccaacactggataaaatgtagatggggacacaggcacaacccaggcctgacaaccccgtgtgtatgaagtagaactggcccccagcacccagaagtcatggaggtatcactcacagaatacgtagaattgtctggttacttcttcattcacaagattttcttttataacgtgtagggtatagattcctgcgtcattgtgggtgacgttctggatcagcagggttccattggggtatattgtctctcgaccgttgtgtgcgggccctggggcattttcttgacttatattttttacatatcctataattcgatagttggcatgcaccctttcccctttgtaccagttgtagccataaagattctgggactcattatggactactagaaggacctccttcccttctgcgacattgaacggcacgacatcaatattggtctgggcactgtttggcaggttccagaaggttaaaagcgaggctaggagggggagagaacatcagtcaatattgggacctatgtattggggtggaaagatggggccctggatcctgagcaggtctcttcacccacccccatcttgaagtaagtgtgtgtgtgtgtgtgtgtgtcctactggatcaatgtcagcagcatgtcccctatcagcacctctgaccttacatttccctgttcggaatcctcttccccagggatctgcagggctccctccatactgctggacctgcttacatcagggcatccttgggagaccccttccctgacaccttctctagaagccctgggtgttccgtttctgacatttccctgctctgttccctttagagctcttgtcaacacctggcttcacattctagatctctttgcctgtctgtcttctgccgcatgagagcgtgagctctgtgagggcagggacttgtgtgaactggattgcaccccagtgcctggaacaggctgcaggctccagtagatgagttcatgagagttcccagggccctccctccacatcctggggtttattttccaatgcctgaggttggtggctagggacaatgttttatgccctggttatgtttttatttgaagcgtcacatgatatagttattattatcatatttcaaaatgtagcagctagtgatgattaaccaggaaaagagaacatgtgagattttcttgaccctttccaattccagtccaatgtgattttcctgttctggtttcctgtccctgtctggtgtcctctcccaaaggacttcaacagaagccctttgtcccctctcagagccccgtcctcccaaggagaccccagccagtctctctggccctcctcccacccactcccaggaagtcctcccctcacctgtgagcaggagcccctgccagggaatgcacactctgtatggacaggctgaaggggaccccatggtctctgctgcctgcttgtcctctgtggagaagagcttgggctccaggaactctcttgtcagggctgctgtgactgtcagctctgctgtccttcctacctctgtgctgagcctcctcccagggcaggagcactttccaagatcacatggtccaggggtggggtctctgctcaggagtcctctgtcccctcccctctcattcctgcctcttttgtccctcttcctctttcccttttgtctatattcagttcccgatacaaagctttgagtagcaaggctgatggacccctgtcccctgggaggacaaccaacctttcccagtgctgacctatgctgtgttctggccttgggtctgtcacaccagggggattatttcccttgtgacagagaaacccagctgggccttgggtttctgctgggatgatgcccagcaggaaggtgacagaggtggctctgggggatagaaaggggctcactgggggatgactggggagggaccagccctctgtctccagtgacccaggcacagaaaccaaggcccaggggtctcaggaggagctacagctcctgggtgtggagggaggtgtctggtgtgtcctgggaagagagctgtggtggagggaggtgtgtggctctgagctctgctgtccttggggaaggcttcaaggaaaccctccctctccctgtcttttggatgtgctgtggctcaggtcctttccatgttctacctgacctggaagcctctgtctggctgacagtcctgtggtcaccccgccttccccatgggtggtgccaggagggaatggggagctgcacagaaacccctggcagagcggggtcttcaaaggccccaggaaggaagaggtgggacacagcaggaacgcgtgaaagacaagaagggtctgttggagcaaggaatggaaaccaggctccaccttcaccaccttagcaaggccaagttcatgtccaggggaattacagctgaccttcgaacacacagatttgaacacacaggtccacttacatgtcgatgtttttttgtttgtttgtttgtttgtttgatttttgttttttgttttttgtttgtttgttttttgcttttttttttttcctgagacagagtctcactctgttgcccatgctagagtgcagtggcacgatctcagctcactacaacctccacctcccgggttcaagtgattctcctgcctcagcctcccaagtagctgggactataggcacccgccaccacgcctggttaatttttgtatttttagtagaggcggggtttcaccatgttggccaggctggtctcagactcctgacttcaaatgatccacccacctcagcctcccaaagtgctgagattacaagcatgagctgccatgcccagccacatgcagatgttttaaattaaaagttgcactgagtgtgtcccctcctcttgcctcccctccacctcttctacctctgccatctctgagacagcaagaccaccctctcctttcctcctcctcagcctacttaacctggagacaaaaaaaggataaaagcctttatgatgatccactgtcacttaatgaatagtaaatatgttttatcttccttatgattttcatagtaacattttattttccccagcttatgttattgtaagagtacagtatataatataaataaacatgcaaaatacattgatttaccgtttatgttaacaataaggcttctggtcaagagtagggttttagtggttcaattgttgggaagccaaaagttatacaaagattttctacggggtcctcagcacccttaacccctgccttattcgagaatcaactgcaatttcctgagtgttctctgtgtgcgatgtgcacccctggaaggcaagagatctgtggtcaaagtcaggggctgttccagggatgttgacgagggtccacatggtgtgacctccaagctacaggatcaggtcaccccaggtcctgctcatggagagtcccaggctgcccaactccatgcagtgcaggatgagctcaaggagaggacaggagttgtccagagaacagcaaatcaagatttggagaactgtccaccagggggataggctgcctcagaaggagccacctgtccccaaggtttcaaaggtaggacccagagaggtgtctctgggggcttcagagagaggacaccagcctaggaggtggtccccagagagccctgtgttcctccatcacagcactgggggtgctgcctccaggtcatctgtgtccctgtctgtcgtctgctccaggcctcctggcaggacccaggagctggggcatttcccacctggatactcaggcaggggtttcctggttcctctgttatgggagggggaggccctatgacccttagcctctctgagatggaaacaaaggcagatcctgggttatcctgtcctcctgcaggggaagttcccctgggtccccaggtctccttgggctggttagaggtctccagagaccacagccaggagcccccatctccagggaccctcgggggtggggtgtcatcacccaacttccttgtgatcaggtcccctggtggtcactccatctgggatggaggatccagagtctgcagcaggtcaggtgtctttgtgagaagaggaaggacataggctgctggcccaggccccctgggagtcgtgacatgactcacaagtcagagacggggaaggggtgtcactgttctgggatgagtcagattctgacccccctctcttagaaggccctgtcctccctcttgaagctctgagggttcaggccctgtccctggggcagccttgggcacttgttggcctcctcccatgctggcaccagtgcctctgtgtccacaaagaacagaccctgactccgggggtcacacagaggtgatgtgcttctgttgtgtgaccgcccacgcatttaaccagtatttgttgagcatctgttgtatgtcagacactggactgggccctgggattccacaaaaagcaggacagacgtggcccctgtgctcatggagtttccctgtaacagggagacaggtgctcagtgaacatcatgggactgaagagctaatgctaatgagagaagggctgtgaatgtgctctgaggatcacagggagctgccctaggagatgcctttcggctgagccccagggaggaggcgatgtgggggcaggagctgcccgcagaagttgtgacttggtggacggccactggactgcaaggaggagctgacagagtgcgtctggggagcttggagggcgaggaggaggtgggtcgaggtgatcctggtgagggtataccctgggggactctagtccagctgaaggacgtcagcggacgctggggaggtgccaggccgggagggactctgctgccctctgggggacaatgaggaaagtgtagacggaaaaatcaggataggtttaactcaacgtgatcattaagcattgatcacgtttgcttgacgctttaaattctagatatctctcacgcaagctcttctctactctacccccagcgaatcatcaaaattagattgtggtcttatgtcaggtcaagttctgtgtgcacttagagggatcccacacagtattcacacttgagggccggctggagcatgtgtgggtagaagggaggattcgtgtccgtgtatcctcacaagagccagggtgtctgggtggataaggctccacttgaccccaaaagtcctcagaacaagggagcagagcctgatgaaatcagaatccaggggtggggctggggctctgtgcctcctcctcctcccttcctctctctctctggggagttcgccctcctctccctcagcagaattcttgggcctcctcatatgaagaaacgtgatgggcccttacagacccacccagagatttttagcagagacatcaggtttcagtgtcaggagcaccagtcacccctcaggcctccccagacccctcctcagagacagatataaatatatctgtatataccttcagtgtgttagtatctttatgaataagtagagtttcttgcaagcagcatatgcttggatcatgtttttttatctgtttcatatttttaatctgtttcaccaatctgtatcttttaagtggagcatttaatccatttacatttaaggttcatattgacatgtgaggttttcttcctgtcataatgataattgtcagctagttactttgtagcttgtttctttttttagtttatggacttttcttttctgtttggaactccttcgagcatttcttaaattccctcagaatttgcttctgggaaagactttatttctccattttgaagcttattcttgcaggataaaaaattcaaagttgatgtttattgttgtttttttctttaagtactttgaaaatagattctcaatcccttctggcttgtagggattctgcagagaagtctactgctagtctgatggggtttcctttataggagattaaacacttttctcttgctgattttaggattttttccttcatgttgaccttagacagcctgataactatagttgcggtgaggtccttcttgcaatgtatctgcctggttctatttaagccttttctatctgaatgcctagatgtcttgctagactagctaagttttcctcaataatttcctcaaataggttgaccaaactttacagtttttcttctccctcagaaatacctataattcctaggtttggatgttttacttagccccatgcctctcaaaggttttgttcctttgtaaatgttttttctttatttttctctgactggattaattataaagacctgtcttcaagttctgagattctttcttctgcttgatctggtctgttgttaaagctttcaactgcattttgtaattccttcaattttttttttattttcagaagttccatttgtttgtttgtttaatatctatctttctggtaaatttctcattcatatcctgaattgattttctgatttctttgcattagttttcatatttatcttggatctaatggagcttctagaaaatcaatattttgaatcctttatctggtatcttaaagattttattttcattagaatctattgctggatagttagtgtgatctttttggggtgttatcctatttttttatgcttccagaattgttacactggttccttctcatttgtagaaactgtcacttctttttatttttgaatttacttttgatggaacttttttcttgaaattgcaattatattgcatgttgagtagggtcaattggctttccttctgggtgctttcaatggcagacactctatatgaattctttggttatagatagccttagtgtggtggctttttcaaatgccagtgactgtagcagtgcgtcaggtatgtgagcaaactcatggcctcctgcagaactagagtggcagagatctcaagaaccttatctttaaaaaaattaataataataataataataataaaagaaacttatcttgttcccaagttccatgcacttgattgtcaagttttgcactgggtttagaagatcagcctccaagccattaggtgtcatttgaaggtaaagagccagctgcaggccaggctcagtggttcacacctgtaatcccaacactttgggaggccaaggtgagcagatcacctgaggtcaggttcgaggccagcctggccaacatggtgaaaccccatctctactaaaaatacaaaaattagccagatgtggtggtccgtgcctgtgatcccagctactcgggaggctgaaacaggagaattgcttgaacccaggagacagaggttgcaatgagctgagatcacaccattgcactccagcctgggcaacaaaagtgaaactccatctcacaaaaaaaagagagagagagagagccaactgcagtactgcagtgatagcagtggggcttatgctttgtttaccagaagaagctttttagtgctttagacagtgagctggtctgtctaacccaagtgacctgggctccatactcagccccagaagtgaagggtgaagctgggtggagccaaaccaggcaagcctaccctcagggctcccagtggcctgagaaccattggacccaggacccattacttctagggtaaggaaggtacaaacaccagatccaaccatggtctggggggacagctgtcaaatgcctaaaaatatacctgggagaggagcaggcaaactatcactgccccaggttctctgaacagaaacagaggggcaacccaaagtccaaatccaggtgagcaggtgcaccaaatgcccagagatatgacgaggcaagaagtgaaggaaccacccctgcatcaaatgttttgcatgggaaggagaagggggttgctcatgttcccaatccaggagaatgcatttgggatctgccttcttctcactccttggttagcaagactaagcaaccaggactctggatttggggaaagacgtttatttgtggaggccagtgatgacaatcccacgagggcctaggtgaagagggcaggaaggctcgagacactggggactgagtgaaaaccacacccatgatctgcaccacccatggatgctccttcattgctcacctttctgttgatatcagatggccccattttctgtaccttcacagaaggacacaggctagggtctgtgcatggccttcatccccggggccatgtgaggacagcaggtgggaaagatcatgggtcctcctgggtcctgcagggccagaacattcatcacccatactgacctcctagatgggaatggcttccctggggctgggccaacggggcctgggcaggggagaaaggacgtcaggggacagggaggaagggtcatcgagacccagcctggaaggttcttgtctctgaccatccaggatttacttccctgcatctacctttggtcattttccctcagcaatgaccagctctgcttcctgatctcagcctcccaccctggacacagcaccccagtccctggcccggctgcatccacccaataccctgataacccaggacccattacttctagggtaaggagggtccaggagacagaagctgaggaaaggtctgaagaagtcacatctgtcctggccagaggggaaaaaccatcagatgctgaaccaggagaatgttgacccaggaaagggaccgaggacccaagaaaggagtcagaccaccagggtttgcctgagaggaaggatcaaggccccgagggaaagcagggccggctgcatgtgcaggacactggtggggcatatgtgtcttagattctccctgaattcagtgtccctgccatggccagactctctactcaggcctggacatgctgaaataggacaatggccttgtcctctctccccaccatttggcaagagacataaaggacattccaggacatggcttcctgggaggtccaggttctctgtctcacacctcagggactgtagttactgcatcagccatggtaggtgctgatctcacccagcctgtccaggcccttccactctccactttgtgaccatgtccaggaccacccctcagatcctgagcctgcaaatacccccttgctgggtgggtggattcagtaaacagtgagctcctatccagcccccagagccacctctgtcaccttcctgctgggcatcatcccaccttcacaagcactaaagagcatggggagacctggctagctgggtttctgcatcacaaagaaaataatcccccaggttcggattcccagggctctgtatgtggagctgacagacctgaggccaggagatagcagaggtcagccctagggagggtgggtcatccacccaggggacaggggtgcaccagccttgctactgaaagggcctccccaggacagcgccatcagccctgcctgagagctttgctaaacagcagtcagaggaggccatggcagtggctgagctcctgctccaggccccaacagaccagaccaacagcacaatgcagtccttccccaacgtcacaggtcaccaaagggaaactgaggtgctacctaaccttagagccatcaggggagataacagcccaatttcccaaacaggccagtttcaatcccatgacaatgacctctctgctctcattcttcccaaaataggacgctgattctcccccatcatggatttctcccttgtcccgggagccttttctgccccctatgatctgggcactcctgacacacacctcctctctggtgacatatcagggtccctcactgtcaagcagtccagaaaggacagaaccttggacagcgcccatctcagcttcacccttcctccttcacagggttcagggcaaagaataaatggcagaggccagtgagcccagagatggtgacaggcagtgacccaggggcagatgcctggagcaggagctggcggggccacagggagaaggtgatgcaggaagggaaacccagaaatgggcaggaaaggaggacacaggctctgtggggctgcagcccagggttggactatgagtgtgaagccatctcagcaagtaaggccaggtcccatgaacaagagtgggagcacgtggcttcctgctctgtatatggggtgggggattccatgccccatagaaccagatggccggggttcagatggagaaggagcaggacaggggatccccaggataggaggaccccagtgtccccacccaggcaggtgactgatgaatgggcatgcagggtcctcctgggctgggctctccctttgtccctcaggattccttgaaggaacatccggaagccgaccacatctacctggtgggttctggggagtccatgtaaagccaggagcttgtgttgctaggaggggtcatggcatgtgctgggggcaccaaagagagaaacctgagggcaggcaggacctggtctgaggaggcatgggagcccagatggggagatggatgtcaggaaaggctgccccatcagggagggtgatagcaatggggggtctgtgggagtgggcacgtgggattccctgggctctgccaagttccctcccatagtcacaacctggggacactgcccatgaaggggcgcctttgcccagccagatgctgctggttctgcccatccactaccctctctgctccagccactctgggtctttctccagatgccctggacagccctggcctggacctgtcccctgagaggtgttgggagaagctgagtctctggggacactctcatcagagtctgaaaggcacatcaggaaacatccctggtctccaggactaggcaatgaggaaagggccccagctcctccctttgccactgagagggtcgaccctgggtggccacagtgacttctgcgtctgtcccagtcaccctgaaaccacaacaaaaccccagccccagaccctgcaggtacaatacatgtggggacagtctgtacccaggggaagccagttctctcttcctaggagaccgggcctcagggctgtgcccggggcaggcgggggcagcacgtgcctgtccttgagaactcgggaccttaagggtctctgctctgtgaggcacagcaaggatccttctgtccagagatgaaagcagctcctgcccctcctctgacctcttcctccttcccaaatctcaaccaacaaataggtgtttcaaatctcatcatcaaatcttcatccatccacatgagaaagcttaaaacccaatggattgacaacatcaagagttggaacaagtggacatggagatgttacttgtggaaatttagatgtgttcagctatcgggcaggagaatctgtgtcaaattccagcatggttcagaagaatcaaaaagtgtcacagtccaaatgtgcaacagtgcaggggataaaactgtggtgcattcaaactgagggatattttggaacatgagaaaggaagggattgctgctgcacagaacatggatgatctcacacatagagttgaaagaaaggagtcaatcgcagaatagaaaatgatcactaattccacctctataaagtttccaagaggaaaacccaattctgctgctagagatcagaatggaggtgacctgtgccttgcaatggctgtgagggtcacgggagtgtcacttagtgcaggcaatgtgccgtatcttaatctgggcagggctttcatgagcacataggaatgcagacattactgctgtgttcattttacttcaccggaaaagaagaataaaatcagccgggcgcggtggctcacgcctgtaatcccagcactttagaaggctgaggtgggcagattacttgaggtcaggagttcaagaccaccctggccaatatggtgaaaccccggctctactaaaaatacaaaaattagctgggcatggtggtgcgcgcctgtaatcccagctactcgggaggctgaggctggacaattgcttggacccaggaagcagaggttgcagtgagccaagattgtgccactgcactccagcttgggcaacagagccagactctgtaaaaaaaaaaaaaaaaaaaaaaaaaaaaaaaaagaaagaaagaaaaagaaaagaaagtataaaatctctttgggttaacaaaaaaagatccacaaaacaaacaccagctcttatcaaacttacacaactctgccagagaacaggaaacacaaatactcattaactcacttttgtggcaataaaaccttcatgtcaaaaggagaccaggacacaatgaggaagtaaaactgcaggccctacttgggtgcagagagggaaaatccacaaataaaacattaccagaaggagctaagatttactgcattgagttcattccccaggtatgcaaggtgattttaacacctgaaaatcaatcattgcctttactacatagacagattagctagaaaaaaattacaactagcagaacagaagcaatttggccttcctaaaattccacatcatatcatcatgatggagacagtgcagacgccaatgacaataaaaagagggacctccgtcacccggtaaacatgtccacacagctccagcaagcacccgtcttcccagtgaatcactgtaacctcccctttaatcagccccaggcaaggctgcctgcgatggccacacaggctccaacccgtgggcctcaacctcccgcagaggctctcctttggccaccccatggggagagcatgaggacagggcagagccctctgatgcccacacatggcaggagctgacgccagagccatgggggctggagagcagagctgctggggtcagagcttcctgaggacacccaggcctaagggaaggcagctccctggatgggggcaaccaggctccgggctccaacctcagagcccgcatgggaggagccagcactctaggcctttcctagggtgactctgaggggaccctgacacgacaggatcgctgaatgcacccgagatgaaggggccaccacgggaccctgctctcgtggcagatcaggagagagtgggacaccatgccaggcccccatggcatggctgcgactgacccaggccactcccctgcatgcatcagcctcggtaagtcacatgaccaagcccaggaccaatgtggaaggaaggaaacagcatcccctttagtgatggaacccaaggtcagtgcaaagagaggccatgagcagttaggaagggtggtccaacctacagcacaaaccatcgtctatcataagtagaagccctgctccatgacccctgcatttaaataaacgtttgttaaatgagtcaaattccctcaccatgagagctcacctgtgtgtaggcccatcacacacacaaacacacacacacacacacacacacacacacacagggaaagtgcaggatcctggacagcaccaggcaggcttcacaggcagagcaaacagcgtgaatgacccatgcagtgccctgggccccatcagctcagagaccctgtgagggctgagatggggctaggcaggggagagacttagagagggtggggcctccagggagggggctgcagggagctgggtactgccctccagggagggggctgcagggagctgggtactgccctccagggagggggctgcagggagctgggtactgccctccagggagggggctgcagggagctgggtactgccctccagggagggggctgcagggagctgggtactgccctccagggaggcaggagcactgttcccaacagagagcacatcttcctgcagcagctgcacagacacaggagcccccatgactgccctgggccagggtgtggattccaaatttcgtgccccattgggtgggacggaggttgaccgtgacatccaaggggcatctgtgattccaaacttaaactactgtgcctacaaaataggaaataaccctactttttctactatctcaaattccctaagcacaagctagcaccctttaaatcaggaagttcagtcactcctggggtcctcccatgcccccagtctgacttgcaggtgcacagggtggctgacatctgtccttgctcctcctcttggctcaactgccgcccctcctgggggtgactgatggtcaggacaagggatcctagagctggccccatgattgacaggaaggcaggacttggcctccattctgaagactaggggtgtcaagagagctgggcatcccacagagctgcacaagatgacgcggacagagggtgacacagggctcagggcttcagacgggtcgggaggctcagctgagagttcagggacagacctgaggagcctcagtgggaaaagaagcactgaagtgggaagttctggaatgttctggacaagcctgagtgctctaaggaaatgctcccaccccgatgtagcctgcagcactggacggtctgtgtacctccccgctgcccatcctctcacagcccccgcctctagggacacaactcctgccctaacgtgcatctttcctgtctcattccacacaaaagggcctctggggtccctgttctgcattgcaaggagtggaggtcacgttcccacagaccacccagcaacagggtcctatggaggtgcggtcaggaggatcacacgtccccccatgcccaggggactgactctgggggtgatggattggcctggaggccactggtcccctctgtccctgaggggaacctgcaccctggaggctgccacatccctcctgattctttcagctgagggcccttcttgaaatcccagggaggactcaacccccactgggaaaggcccagtgtggacggttccacagcagcccagctaaggcccttggacacagatcctgagtgagagaacctttagggacacaggtgcacggccatgtccccagtgcccacacagagcaggggcatctggaccctgagtgtgtagctcccgcgactgaacccagcccttccccaatgacgtgacccctggggtggctccaggtctccagtccatgccaccaaaatctccagattgagggtcctcccttgagtccctgatgcctgtccaggagctgccccctgagcaaatctagagtgcagagggctgggattgtggcagtaaaagcagccacatttgtctcaggaaggaaagggaggacatgagctccaggaagggcgatggcgtcctctagtgggcgcctcctgttaatgagcaaaaaggggccaggagagttgagagatcagggctggccttggactaaggctcagatggagaggactgaggtgcaaagagggggctgaagtaggggagtggtcgggagagatgggaggagcaggtaaggggaagccccagggaggccgggggagggtacagcagagctctccactcctcagcattgacatttggggtggtcgtgctagtggggttctgtaagttgtagggtgttcagcaccatctggggactctacccactaaatgccagcaggactccctccccaagctctaacaaccaacaatgtctccagactttccaaatgtcccctggagagcaaaattgcttctggcagaatcactgatctacgtcagtctctaaaagtgactcatcagcgaaatccttcacctcttgggagaagaatcacaagtgtgagaggggtagaaactgcagacttcaaaatctttccaaaagagttttacttaatcagcagtttgatgtcccaggagaagatacatttagagtgtttagagttgatgccacatggctgcctgtacctcacagcaggagcagagtgggttttccaagggcctgtaaccacaactggaatgacactcactgggttacattacaaagtggaatgtggggaattctgtagactttgggaagggaaatgtatgacgtgagcccacagcctaaggcagtggacagtccactttgaggctctcaccatctaggagacatctcagccatgaacatagccacatctgtcattagaaaacatgttttattaagaggaaaaatctaggctagaagtgctttatgctcttttttctctttatgttcaaattcatatacttttagatcattccttaaagaagaatctatccccctaagtaaatgttatcactgactggatagtgttggtgtctcactcccaacccctgtgtggtgacagtgccctgcttccccagccctgggccctctctgattcctgagagctttgggtgctccttcattaggaggaagagaggaagggtgtttttaatattctcaccattcacccatccacctcttagacactgggaagaatcagttgcccactcttggatttgatcctcgaattaatgacctctatttctgtcccttgtccatttcaacaatgtgacaggcctaagaggtgccttctccatgtgatttttgaggagaaggttctcaagataagttttctcacacctctttgaattacctccacctgtgtccccatcaccattaccagcagcatttggaccctttttctgttagtcagatgctttccacctcttgagggtgtatactgtatgctctctacacaggaatatgcagaggaaatagaaaaagggaaatcgcattactattcagagagaagaagacctttatgtgaatgaatgagagtctaaaatcctaagagagcccatataaaattattaccagtgctaaaactacaaaagttacactaacagtaaactagaataataaaacatgcatcacagttgctggtaaagctaaatcagatatttttttcttagaaaaagcattccatgtgtgttgcagtgatgacaggagtgcccttcagtcaatatgctgcctgtaatttttgttccctggcagaatgtattgtcttttctccctttaaatcttaaatgcaaaactaaaggcagctcctgggccccctccccaaagtcagctgcctgcaaccagccccacgaagagcagaggcctgagcttccctggtcaaaatagggggctagggagcttaaccttgctcgataaagctgtgttcctagaatgtcgctcctgttcccaggggcaccagcctggagggtggtgagcctcactggtggcctgatgcttaccttgtgccctcacaccagtggtcactggaaccttgaacacttggctgtcgcccggatctgcagatgtcaagaacttctggaagtcaaattactgcccacttctccagggcagatacctgtgaacatccaaaaccatgccacagaaccctgcctggggtctacaacacatatggactgtgagcaccaagtccagccctgaatctgtgaccacctgccaagatgcccctaactgggatccaccaatcactgcacatggcaggcagcgaggcttggaggtgcttcgccacaaggcagccccaatttgctgggagtttcttggcacctggtagtggtgaggagccttgggaccctcaggattactccccttaagcatagtggggacccttctgcatccccagcaggtgccccgctcttcagagcctctctctctgaggtttacccagacccctgcaccaatgagaccatgctgaagcctcagagagagagatggagctttgaccaggagccgctcttccttgagggccagggcagggaaagcaggaggcagcaccaggagtgggaacaccagtgtctaagcccctgatgagaacagggtggtctctcccatatgcccataccaggcctgtgaacagaatcctccttctgcagtgacaatgtctgagaggacgacatgtttcccagcctaacgtgcagccatgcccatctacccactgcctactgcaggacagcaccaacccaggagctgggaagctgggagaagacatggaatacccatggcttctcaccttcctccagtccagtgggcaccatttatgcctaggacacccacctgccggccccaggctcttaagagttaggtcacctaggtgcctctgggaggccgaggcaggagaattgcttgaacccgggaggcagaggttgcagtgagccgagatcacaccactgcactccagcctgggtgacagaatgagactctgtctcaaaaaaaaagagaaagatagcatcagtggctaccaagggctaggggcaggggaaggtggagagttaatgattaatagtatgaagtttctatgtgagatgatgaaaatgttctggaaaaaaaaatatagtggtgaggatgtagaatattgtgaatataattaacggcatttaattgtacacttaacatgattaatgtggcatattttatcttatgtatttgactacatccaagaaacactgggagagggaaagcccaccatgtaaaatacacccaccctaatcagatagtcctcattgtacccaggtacaggcccctcatgacctgcacaggaataactaaggatttaaggacatgaggcttcccagccaactgcaggtgcacaacataaatgtatctgcaaacagactgagagtaaagctgggggcacaaacctcagcactgccaggacacacacccttctcgtggattctgactttatctgacccggcccactgtccagatcttgttgtgggattgggacaagggaggtcataaagcctgtccccagggcactctgtgtgagcacacgagacctccccacccccccaccgttaggtctccacacatagatctgaccattaggcattgtgaggaggactctagcgcgggctcagggatcacaccagagaatcaggtacagagaggaagacggggctcgaggagctgatggatgacacagagcagggttcctgcagtccacaggtccagctcaccctggtgtaggtgccccatccccctgatccaggcatccctgacacagctccctcccggagcctcctcccaggtgacacatcagggtccctcactcaagctgtccagagagggcagcaccttggacagcgcccaccccacttcactcttcctccctcacagggctcagggctcagggctcaagtctcagaacaaatggcagaggccagtgagcccagagatggtgacagggcaatgatccaggggcagctgcctgaaacgggagcaggtgaagccacagatgggagaagatggttcaggaagaaaaatccaggaatgggcaggagaggagaggaggacacaggctctgtggggctgcagcccaggatgggactaagtgtgaagacatctcagcaggtgaggccaggtcccatgaacagagaagcagctcccacctcccctgatgcacggacacacagagtgtgtggtgctgtgcccccagagtcgggctctcctgttctggtccccagggagtgagaagtgaggttgacttgtccctgctcctctctgctaccccaacattcaccttctcctcatgcccctctctctcaaatatgatttggatctatgtccccgcccaaatctcatgtcaaattgtaaaccccaatgttggaggtggggccttgtgagaagtgattggataatgcgggtggattttctgctttgatgctgtttctgtgatagagatctcacatgatctggttgtttaaaagtgtgtagcacctctcccctctctctctctctctcttactcatgctctgccatgtaagacgttcctgtttccccttcaccgtccagaatgattgtaagttttctgaggcctccccaggagcagaagccactatgcttcctgtacaactgcagaatgatgagcgaattaaacctcttttctttataaattacccagtctcaggtatttctttatagcaatgcgaggacagactaatacaatcttctactcccagatccccgcacacgcttagccccagacatcactgcccctgggagcatgcacagcgcagcctcctgccgacaaaagcaaagtcacaaaaggtgacaaaaatctgcatttggggacatctgattgtgaaagagggaggacagtacacttgtagccacagagactggggctcaccgagctgaaacctggtagcactttggcataacatgtgcatgacccgtgttcaatgtctagagatcagtgttgagtaaaacagcctggtctggggccgctgctgtccccacttccctcctgtccaccagagggcggcagagttcctcccaccctggagcctccccaggggctgctgacctccctcagccgggcccacagcccagcagggtccaccctcacccgggtcacctcggcccacgtcctcctcgccctccgagctcctcacacggactctgtcagctcctccctgcagcctatcggccgcccacctgaggcttgtcggccgcccacttgaggcctgtcggctgccctctgcaggcagctcctgtcccctacaccccctccttccccgggctcagctgaaagggcgtctcccagggcagctccctgtgatctccaggacagctcagtctctcacaggctccgacgccccctatgctgtcacctcacagccctgtcattaccattaactcctcagtcccatgaagttcactgagcgcctgtctcccggttacaggaaaactctgtgacagggaccacgtctgtcctgctctctgtggaatcccagggcccagcccagtgcctgacacggaacagatgctccataaatactggttaaatgtgtgggagatctctaaaaagaagcatatcacctccgtgtggcccccagcagtcagagtctgttccatgtggacacaggggcactggcaccagcatgggaggaggccagcaagtgcccgcggctgccccaggaatgaggcctcaacccccagagcttcagaagggaggacagaggcctgcagggaatagatcctccggcctgaccctgcagcctaatccagagttcagggtcagctcacaccacgtcgaccctggtcagcatccctagggcagttccagacaaggccggaggtctcctcttgccctccagggggtgacattgcacacagacatcactcaggaaacggattcccctggacaggaacctggctttgctaaggaagtggaggtggagcctggtttccatcccttgctccaacagacccttctgatctctcccacatacctgctctgttcctttctgggtcctatgaggaccctgttctgccaggggtccctgtgcaactccagactccctcctggtaccaccatggggaaggtggggtgatcacaggacagtcagcctcgcagaggacagagaccacccaggactgtcagggagaacatggacaggccctgagccgcagctcagccaacagacacggagagggagggtccccctggagccttccccaaggacagcagagcccagagtcacccacctccctccaccacagtcctctctttccaggacacacaagacacctccccctccacatgcaggatctggggactcctgagacctctgggcctgggtctccatccctgggtcagtggcggggttggtggtactggagacagagggctggtccctccccagccaccacccagtgagcctttttctagcccccagagccacctctgtcaccttcctgttgggcatcatcccaccttcccagagccctggagagcatggggagacccgggaccctgctgggtttctctgtcacaaaggaaaataatccccctggtgtgacagacccaaggacagaacacagcagaggtcagcactggggaagacaggttgtcctcccaggggatgggggtccatccaccttgccgaaaagatttgtctgaggaactgaaaatagaagggaaaaaagaggagggacaaaagaggcagaaatgagaggggaggggacagaggacacctgaataaagaccacacccatgacccacgtgatgctgagaagtactcctgccctaggaagagactcagggcagagggaggaaggacagcagaccagacagtcacagcagccttgacaaaacgttcctggaactcaagctcttctccacagaggaggacagagcagacagcagagaccatggagtctccctcggcccctccccacagatggtgcatcccctggcagaggctcctgctcacaggtgaagggaggacaacctgggagagggtgggaggagggagctggggtctcctgggtaggacagggctgtgagacggacagagggctcctgttggagcctgaatagggaagaggacatcagagagggacaggagtcacaccagaaaaatcaaattgaactggaattggaaaggggcaggaaaacctcaagagttctattttcctagttaattgtcactggccactacgtttttaaaaatcataataactgcatcagatgacactttaaataaaaacataaccagggcatgaaacactgtcctcatccgcctaccgcggacattggaaaataagccccaggctgtggagggccctgggaaccctcatgaactcatccacaggaatctgcagcctgtcccaggcactggggtgcaaccaagatcacacaaatccctgccctcatgaagctcatgctctcatggggaggaagacagacatacaaagagatctagaatgtgaggtcaggtgttgacaagagccctggagggaatagagcagggaaaggtcagaaaaggaagacccagggtctctagaggaggtgtcagggaagggatctcccaagaatgccctgatgtgagcaggacctgaaggcaatggggagggagccgtgaagacccctggaaaagcagattccacacagggaaatgccaaggtcagaggtgctaaggaaataggagacacactgctgaccttgacctagtaggacacacacacacacacacacacacacacactcactcactccagggctgggggatgaagagacctgctcaggacccaggaccccatttttccaccctaatgcataggtcccaatattgaccgatgctctctgctctctcctagcctcacttctaaccttctggaacccgcccaccactgccaagctcactattgaatccacgccgttcaatgtcgcagaggggaaggaggtgcttctacttgtccacaatctgccccagcatctttttggctacagctggtacaaaggtgaaagagtggatggcaaccgtcaaattataggatatgtaataggaactcaacaagctaccccagggcccgcatacagtggtcgagagataatataccccaatgcatccctgctgatccagaacatcatccagaatgacacaggattctacaccctacacgtcataaagtcagatcttgtgaatgaagaagcaactggccagttccgggtataccgtgagtgattcccccatgacctctgggtgttgggggtcagttctacttcccacacacaggattatcaggcctgggctgtgcctgtggccccctctgcattacgcaccatgttagggtttgggcatttagtgcaggatacacacagaagagacaaacttcaacagatcagaattcctttccggcatccagaccctgcagacactcactgcagaggaaggacagtctgatgtgggggacttagcagggggaggtcagtctcagccaagcaccccgtgccctccccgtaaacctgaccctgagaaagaccctggagaactgcatcagagcctggcctgagggacccctgggatattcacagagaagctcagccccagggctcctggttccaggtgactcaggggagcctgtgccagggctgtgttgtggcctcctgggcaaggctaactggaagcaaggacttagcagctgtccaagggctgtggctcctggagctggattctggatgcagaatcggactttctggccacacttgttccctgtccccagagtctcatttggacaaggacagagccttgtcctttacttgagactcaatgtggggaggatagatagacaaggttattagggtgtcagtccattgccctggggacataggtgactccatgggaagctcagtgtccccaggaagaggaacagaggagagaagatgctcccggcagctccttgtccaccagggatcaggcccagggccttctctcttggaggcaaataaacataaatgatgttcatttgagcagctcctctgtgcagagctgagatcaagtaattgtaaatattttgaggttaattcacaaacaacctcacagccaaatagcacttatcctacttattgaaaggaaattgaggcacagggagacagtcactaacaagggtcacacaggccataggtgtcagattgaagtcacatgaggtctgtctgtagccacagccccctcctctcctcaactgggggtgggtggggctgtttgttgttaggcatctgcatctgagaccagtcatgggcttgcgttcttttgtcttgggcatccacagctcagaagcggagattctggtctggagagtgataagtaaatggagaaataatcagttttactctagaactagatcacctcaacagtcagggtcagtgccgggattgtccaggcctctccctgagatccacagccccctcacatgacctcaaatcctgtgtttcccgatgtgtcagtgtcactcccacggaaggataaaggaaaggacttcgctttctctccccactcacaccctgtgccaacagaggcccaaagtgagacacacgcttgctcagtagctctctcatgaaggggggaatgagtgaaggaatgatccataacctctatagagactggatcctggatgcagaatcctgggaggttctgaccacacctgttccgtgtccatcaggggctgagatccatgtaccattcctctgaccccctgtcccgaaagccaccctatctcatgtgactctggggttccttggccatgggagggttttcaaggctccctggtcctggtcgggacagccaagggactcctagtcctggggtctccgaggtcactataccccgcatggctcattgccatgggcatttctgactttcttctattcctccatgttcttcgtcttcctccctcttcattccagctgagatgcccatccctgaacatcttcctccactcttaggccttccccagacactcccttgaacaaggctggctgtcctgttttcttgccgctcacactgtgtcctggcccacttcccaggcaatagggaaggcacagaaatcacaggcaatagggaaggcacagatggagcccctgccaggctccatcacaagccaatgtcaacaggtcaccaggagaatgagcttccgctgtgttcctgcccagggctctttacttccatgaggccaacacacggaacaggcagcaggacgggaatgagcgactcctccatccactccctacactgactcaccagggggtcagaggcagaaggacaggtctgcagtccccaaagcccgcatgcttatttcactcacttcactacccactccatcttcatcctggtgtggggctcacatcctccagtggatcctgggacctcccccaggtggagctggccaggcaggtgctgtctgataggtttgctgcccattccacatacacctgtgtcctcatgatgatgccattgtcataaggtggagtcccttggactgagaagtgaaccagccactggcgtctcacttagactctacccagttacaaaaacttaaactctagttgtgttttctgaggttgataggagaggaagaaaacctttcacatgcctgttttgaggcttctcctctttttgcctaactctgcacaggaactaggggcagggagcgctttctaaatttactaacatcacacacattgcttctcctaacttggcatcatttctccctttatgtaattgacacacctaagagttcctctctgaccggttctgtcctcttaacaggtctcacatccctctctctgttcagggagtcactgatttcaaaccactttcagcatcttcctttgagcataatgtgatcactttggaattcagagcagacctaaaccttagcataatattaaaagaagtactacttccagcaattgatcttagatctttaggccattgataagaatttccacttatggaaaaaatttaatgtttcccccaaatgtctttcacttttttaactatagtcagaaaataacatgagatctaaactcctgacaaatttttaagggcaaattatagtactacagattgagtatcccaaatcctaaaatccaaaatctgaaatgctccaaaatccaacattttttgaccactgacatgattctcaaaagaaatgctcactgaaggccgggcacggtggctcatgcctgtaatcccagcacttcgggaggccaaggcgggaagatcacaaagtcaagagatcaagaccatcctggccaacatggtgaaaccccgtctctactaaaaatacaaaaattagctgggcgtggtggcatgcacctacagtctcagctactttggaggctgaggcaggagaatcgcttgaacccgggaggtggaggttgcagtgagctgagatcgtgccactgcactccagcctggcaacagagcgagactccatctcaaaaaaaagaaaaagaaagaaaagaaaagaaaaaagaaaggctcactggagcactttggattccgtattttcagatttggggtgctaaactggtaagtatattgcaaatattcaaaactcaaaaacagtcagaaatccaaaacacttttagtcctaagccttacacataagacatactcaatctgtatgaactataggcaccaagctgaacagcagatccctagaacctcctcatcctgcataactgaaactgcagacccatgaacaactctccattcccccagttcccaggctttgacaaccaccattctactctctgattccacaagtgtgactactctagggacttcatataagtggaatcctacagtatctgccctgtgagtggcttatttcatttagcataatgtccaatgggagaaaataattgcaaaacttcttctcaaagttctgtctcataactgtcaaacacacatggtccttgagggccagatttccagcagttcatgctcccccttttccaccagtcagttctgcatttgcaaatgtccacatgtatttatggagagatccacagcatcctcgcctgccctctgcaaggggagaagggacattaaagaccaaagacaggccgggtgcagtggctcatgcttgtaatcccagcactttgggaggccaaggtgggcagaacacctgaggtcagaagttcaagaccagcctgaccaatatggtgaaaccccatctctactaaaaatacaaaatttagctgggtgtggtggtgggcgcctgtagtcccagctactcgggaggctgagacaggagaatcgcttgaacccgggaggcagaggttgccatgagccgagatcgtgcctggccaacacagcaagactccatctcaaaaaacaaacaaacaaacaaagaccaaagacaaagaacatacatatggttctgctgttaaatccgggcagctcctgcctgtcacctgaagttctagatcattccctggactccactctatctttaggggtctctggctcaagtcagtcatcatcaaacacctgggaaaaactgccccaccttgtgcctccactgcctaacgactgagctgacctccaggcttgcctctggtgtcccctgtgttatttctactgaaacatccagtcccaggccaggctgcacaatatgtacagggtttaaggacaatgggaagacccatcactatccatttctaggatgtccttgcaaagggaaaccacagaaaaaatatacctagggaaacaaagtaggactgaaggtggaagggacccagcacttgaatgttccaggtgaggaccctacagtgggccaagtagtcaactggtcagggagggaccaggagaggcaccaggagctgtgacctcccccccagtcctgtgtctgttcacagcccaatgctgctgcttaattcacacttgagaaagtctgtgcttcccccacaccgagcaggcagcctcgcagtctctgagatctcagatcatcgtgcatctgtcttgtgacacatgcacccaccgtgggtttttaagggctcaggtgggctgagaggtggaaggtgccaactctgattgaaagatgcctgtgaggaatcaaaggtgccacacagggcaatcttctctctgttatctgcacagcggagctgcccaagccctccatctccagcaacaactccaaacccgtggaggacaaggatgctgtggccttcacctgtgaacctgagactcaggacgcaacctacctgtggtgggtaaacaatcagagcctcccggtcagtcccaggctgcagctgtccaatggcaacaggaccctcactctattcaatgtcacaagaaatgacacagcaagctacaaatgtgaaacccagaacccagtgagtgccaggcgcagtgattcagtcatcctgaatgtcctctgtgagtatatctgctcctctctggcccaggctgccagcccaaatccacagggccagaggcaggatttctcagtccctctcaggttcaagtacacagaccctcaaccctggacatccagactgtctgtgactttctgccccagaaaaacctgggcagaccaagtcttgaccaagaataggaggggaggggctgcttctgtcctgggaggctcagggtccacaccctatgatgggagaaacaggtgaatatctcagactcaggctcagtagatacaagaggggtttggctgagactttaggattgtgattcagcttagagggacactgtggtccttccatagaccaggaacttccacttccctctgacaatatcacctgtggctttattttgtttgctccagatggcccggatgcccccaccatttcccctctaaacacatcttacagatcaggggaaaatctgaacctctcctgccacgcagcctctaacccacctgcacagtactcttggtttgtcaatgggactttccagcaatccacccaagagctctttatccccaacatcactgtgaataatagtggatcctatacgtgccaagcccataactcagacactggcctcaataggaccacagtcacgacgatcacagtctatggtaagtggatccacgaagcactgacatcatgttttgaggtggagtctgtctggttttcaaacaagagccaggaagacattttctatcccagcctgtgtccagtgggcacaagcaaatcccagattctcccactgaacctccccaatatgtctctacagactcttttcttcttgttctgatttctcatggcgggccccaggtccagcttggaatgtggggaggaggctccctcagccccacagccctgtgtagtggaggaagcttcacagagcgggaaggagcaagggttctcaaggtcaagttgcttctctctgtcaccaatgtgtccctttctgtcacctctttgtgttcttttgcctactccatgagctacaagcaacattcaaggctttgaaacaagctcatacttttttcccaaatgagagaaggaagccccttgggtgagggagacacagctcagactgctccctgctctgctctgggctcccctgggtgactggccttgcctgactccacctaggtgggaacgaggtgtgtggagaaggagcccgggtggtctgtcctgaattcggctaaatcaagctgccaatcaacaccaaagcttcccttcgtcccagtcaggctgcaggaaaatggaaagagagggagcctcagggcagactcctgagctgcgtcctggctctgatgtcaccagctatatgaggctgtgggcacagcacatgggacacagcacaggggacagcaagtgacccacacttggagaaatcaggagattcaccacaggggctctgcacggcagggaatggcagtgtcaaaaatcgtgtgtttatacagatggtaacagtacatatctaacacaaacttaccatcttaacttttctacacatgcagttcagtggtattaaatatattccccttgttctgcttccatcaccaccatctacccacaggactcttttcttcctcccaaaatgaaactctgttcccatcaaactcctgggcagagctgccccatctatggcccacagtctgatccctgacttgtcacctctagacatgctcctagtctcctgcactatttctgctcaaacatccatctccatcatcacctatctctaggatgtccttaaatagcaaagcctcagagcaaacacaacttggctgggtggtgtgggactgtgcagctggaagaaacgcagctccttcaaattccaggtgaggaccccaatgggccaggcagccagccagtcaggaaaggaccagaagtgctgggggctgtgacccccagccctgtgtctgtccacaacccaatgctactgcccaattcacacttgagaaagtctgtgcttctcccacacaaaacagccagcctcatggtctctgagccctcagatcattgtgcatctgtcttgtgacgcacacacacctgccatgagcttttaaggactcagttgggctgagaggtgggagatgccaactctgattgatagatgcccgtggaggaatcacaggtgccacacagggcaatcttctctctgttatctgcacagcagagccacccaaacccttcatcaccagcaacaactccaaccccgtggaggatgaggatgctgtagccttaacctgtgaacctgagattcagaacacaacctacctgtggtgggtaaataatcagagcctcccggtcagtcccaggctgcagctgtccaatgacaacaggaccctcactctactcagtgtcacaaggaatgatgtaggaccctatgagtgtggaatccagaacgaattaagtgttgaccacagcgacccagtcatcctgaatgtcctctgtgagtatcttctgttcctctgtggctcaggctgccagcccaaatccacatagccaaagtccaggcctctcagtccctctcaggcccaaggacagagacttttacccctggacatccaggctggccctacccccagcaaatccatgcaggcccagtcctgaccaagaataggaggggagggtctgctcctgtcctgtaacactcgggatccacagctagtgatgggagaaacagatgaatgtctcagactctggctaattggatacagtaggggtttggttaggacttcaggattgtgacttggctcagggggacactgttgccctttcacagaccaggagcttcccctttgctctgatgacattcacctgtggccctattctctttgctccagatggcccagacgaccccaccatttccccctcatacacctattaccgtccaggggtgaacctcagcctctcctgccatgcagcctctaacccacctgcacagtattcttggctgattgatgggaacatccagcaacacacacaagagctctttatctccaacatcactgagaagaacagcggactctatacctgccaggccaataactcagccagtggccacagcaggactacagtcaagacaatcacagtctctggtaagtggatccctggaccgttagcaatatgttctggagcggaatctgtctggttttcagaaaagagccaggaagaaattttctttcctagtatgcatccaatgggcacaagcaatcccaaattcaatcctgagcactcccaatttgtctctacaaacactcttccccttgtttttctgatttctcatggctgaccttgtgtccaccctgagaaatgtggggaggggtcttcatcagccctgagccctatgtagtggaaggggcttcacagagggggaagcaagaagggtcctcaaggtcaagttgctcctctctgtcaccaatatgtccctttctgacaccactttgtgttcttttacctaatccatgagctacaaggaacaactgaggctttgaaacaagctcacactttttccccaaatgagaggaggatgccccttggatgagggaggagcagctcagactctgctcccggctccgctccgggctcccccagtgactggccctgccctgatttcacctggggtgggatccgggcatgtggagaaggtgctcaggtggcctgtcctgaatctggctaagtcaagatgccagatgaagccaagccttcccagggtcaggctacagggaaataagaagagagggagcctcggggcagactcctgagctgtgtcctggagtctgaagtcaccggctgtatgagattgtgggcacagcacatgggacacagcacagaagacagtcagtggcacacacttggagacacacagagattcacccatggggactcaacatggcagggaaggggcagtgccaaaaagtgtgtgtttatagacagggtaagaataccagccactatatatatctaacataagacaccattttaacctttctatgtatgcagtttagtagcattaaatattttcccattattctgctaccatcatcaccatccacccacagaactcttttcttcttcctaaaatgaaactctgttcccatcaaactcttgggtagagctgcccacctgtggcccacagcctgacccctgaactcacctctagacttgctcctggtctcctgagctatttctgcttaaacacccatccccgtcatcacccatctccaggatagccttgaaacaaaaggctcagagaaaacaccccacggttgggtggtgtgggaccgtgcagctgaacggaattcagcacccacaagtccccaggttggccaggccgtcagccatcagggaagaaccaaaggaggtgctgggggctgtgactcccagtcctgggtctgtccacaacccaacgctgctgcccaattcacacttgagaaagtctgtgcttcccccacacaaagcagccggccttacagtctctgagccctcagatcatcgtacatctgtcttgtgatacacacacctgccatgggcttttaaggactcgggtgggctgaagggtgggagttgccaactctgattgaaagatgcctgtgaggaatcaaaagtgccacacagggcaatcttctctctgttatctgcacagcggagctgcccaagccctccatctccagcaacaactccaaacccgtggaggacaaggatgctgtggccttcacctgtgaacctgaggctcagaacacaacctacctgtggtgggtaaatggtcagagcctcccagtcagtcccaggctgcagctgtccaatggcaacaggaccctcactctattcaatgtcacaagaaatgacgcaagagcctatgtatgtggaatccagaactcagtgagtgcaaaccgcagtgacccagtcaccctggatgtcctctgtgagtatcttctgttcctctgtggccctggtttccaacccaaatccacacagccagaggccaggactctcagttctcctcaggtccaaagaggcagactcccacccctggacacccaggctggccataacttcctgtcccaggaaaatttgggcaacctcagcctggaccaagaataggaggggagaggctgctcctgtcctaggaggctcagagtccacagcctatgatgggagaaacagatgaacgtctcagacccagactcagtggacatgagggttatggtttggacttttttttttttttttttttttttgagacggagtctcgctctttcgcccaggctggactgcagtggtgtgatctcggctcactgcaagctccgcctcctaggttcacaccattctcctgcctcagcctcccgagtaactgggattacacacacgtgccgccatgcccagctaatgttttttgtatttttagtagagacggggtttcaccatgttggtcaggctggtctcgaactcctgatctgcccgcctcggcctcccaaagtgctgggattacaggcgtgagccaccgcacccggccgatttggactttttaacacaggattgggacaggattcagagggacactgtggcccttctacaatcaggagcttcccctttcctctgatgacatcacctgtggctttgttctctttgttccagatgggccggacacccccatcatttcccccccagactcgtcttacctttcgggagcgaacctcaacctctcctgccactcggcctctaacccatccccgcagtattcttggcgtatcaatgggataccgcagcaacacacacaagttctctttatcgccaaaatcacgccaaataataacgggacctatgcctgttttgtctctaacttggctactggccgcaataattccatagtcaagagcatcacagtctctggtaagtggctccctggagcatcagcatcatattctggggtggagtctatctggttctcaccaaagagccaagaagacattttctttcccagtctgtgttccatgggcacaaggaaatcccaaattctatcctgagccccctcactccatctcggccaactctctcctccccggcttctctgatatctcacggctgacctcgggtccagcctggaatgtggggaggggcctcccttagccccagaaggcccccaatagtgaaagggacttcatagtccagaagaaagaagggtccttaaggtcgagttgctcctctctatcaccaatatgtccctttctgtcacctctttgtgttttttcacctactctgtgagctacaaggaacaaggaggctttgaaaccagcccacactttttccccaaatgagaggaggaagccccttggatgaggcaggagcagctcagactctgctccctgctctgcgcccggctcacccggtgactggctctgccctggctccacttggggtgggaccggggcatgtggagaaggtgtccaggtggcctgttttgaatctgggtaaatcaagctgccaatccacagcagagcctcccttgggtcaggttgcagggaaatgggaaaagagggagcctcgggacagactcctgagctgtgtcctggctctgaagtcactggctgtatgaggctgtggacacagcacataggacacagcagaggaaagtgagtgacacacacttggagaaatagggagattcagccataggggctctgcatgggagggaacaggcagtgccaaaaagtgtgtgtttatagagagggtaagactatcagccactatatatatctaacataaaacttaccattaaccatttctaagtgtacaattaagtgaaacagcataaatatcaatcaagtatattgcccggtgtggtggctcatccctgtaatcccagcactttgggaggccaaggcgagtggatcacctgaggtcaggagttcaagatacagaaaaaaaaaaatagctaggcatggtggtgggtgcctgtaatcccagctactcgggaggctgaggcaggagaatcgctcgaacctgggcggtgtagtttgcagtgagccgagattgagccactgcactccagcctgggtgacagagtgagactacatcacaaaaaaaaaaaaaaaaaggaaaaaataaatcaagtctttttatactcatgtctaaccatcacatcacactatccatttccagaactttttcatcttaccatactaaacctctgtacccaataaacagtaactccttctctcccctaaactctggtaatctccattctactttctgtctctaggtaatcaactattctaacgatcttacaaaaatggaattatataatagttgtccttttgtgtctgccctatttcacttagcataatgtcttcaaggttcatccattttgcaccatgtatcacaatttcttccttgttaaggttgaagaacattccattgtatggatacacctcatttttctatccacttatctttcaatggacttttcagttgtttccaccttttggctattgtgagtaatgctgctgtgaacatcagtgtacaaatatctgttcaaatcactgccttcaattctttttggtgtatgtccagaaatggaattggtagatcaaatgttaattcttttttttgtttgtttgtttgtttgtttgtttgttttttgagatggagtctcgctctgtcgaccaggctggagtgcactggcgcgatctcggctcactgcaagctccgcctcccgtgttcacgccattctcctgcctcagcctcccgagtagctgggactacaggtgcccgccaacaagcttggctaatttttttttttttatttttagtagagactgagtttcacagtgttagccaggatggtctcgatctcctgacctcgtgatccgcctgccttggcctcccaaagtgctgggattacaggcatgagccaccgtgtccggccccaaatgttaattatttatttaattttttgaggaaccaccataccattttccacagtagctaatatttcacatttctatcagcaatgcactagagttccaatttttccacctccttgaaaacacttattgttttgtggccatcctgatgtgtgtgaggtggagtatcattgtggctttgacttgcatatctctaagtgttagtgatgttgagcatatttgcatgtgcttgttggccatttgtatatcttcctaggagaaatctctactttagtcctttgtccatttattaattgggattttggatttttgtggttgttgatttgtaagagttcttcatatattctggaaattaatcccttatcagatatatgatttgcaaatatatttcccatttcataggttgccttttcactttctcgataatgttctttaatatataaaagtttttaattttcgaggccctgcacggtggttcctgtaatcccagcactttgggaggccgaggcaggtagattacaaggtcaggagatcaagaccatcctggctaacacagtgaaaccccgtctctactaaaaatacaaaaaaaattatccaggcgtggtggtgggcgcctgtagtcccagctactcaagaggctgaggcaggagaatggcatgaacccaggaggcatagcttgcagtgagctgagatcgcaccactgcactccagccagggtgacagagcgagactctgtcaaaaaaaaaaaaaaaaagtttttaattttcatgaagtccagtttatcaatttttttcttttgttgcctatttgttgttataaccaagacatgactgtgaaattaaatgtcattaagcttttttccctatgttttcttctcagagttttatacttttcactcttacatttaggtctttgatccattttaggttaatttgcatatatggtatcaggcaaagattcaacttgttcttgtgcatggatattcagctttccctatatcatttgttgaaaagactgtcctttccccattaaatggtcttggcaccgttatcaaaaatcatttggccatatatgcaagcatttctttctgggctctatattctattgctttggtttcaatatcttcctttatgccaataccacactgtattgattactgtggctttatagcaaatgctgaaatcaggaagtgtgagtcctccagcttcattctttattttccaggttgtttggctatttagagtcctgagattccatatgaatttcaggatatgtttttctatttctgcaaaaaatgtcactgggactctggtacaaattgcgttgaacctgcagctcactttgagtggtattgtcctcctagcaatattgagacttcccatccatgaaaaaaaaatgtctttccatctattgatgttgtctttaatttccttcagcagtgttttatagttttcagggtacaatcctttcacctccttggttaagcttatttctaactattttatactattttatgttaatgtgaattggaaattttttcttaatttccttttagattgttcattgttagtgtgtagaagtacaactgatgtttgcgtgttgattttgtatcctgcaacatcactgaatttatttattaactctaacaagttttttaatcttcagggttttctacagagaagtccaagttatctgaaaacacagatcattttacttctttccaatttggatgtctttttttttcttgcctaatttctctggctaggacttctaatactgtgtcgaatagacgtggcaaaagcaggcattcttgtcttgttcctggtcttacagggaaagctttcagtctttctccattgagtatcatgttagcattgggcttttcacacattgcctttattatgctgaggtggtttccttccattcataattagagtgtttttgttgtgaaagaatggtgaattttgtcaaatgcttttattggttctatctaattataggcctattaaatttttttgtgtttccaggaatttgtccatttcatctaggttattcaacagtttgttggcatacaattattcatagcattcttgtagtccttaatatttctgtagaatttgtagcattggtagcaatatctccattttctttttttttttcttttttttttttaagagacagggtctcactctgtagcccagcacaagctagagtgcagtggtgccatcatagcttactgcagcctcaacctccaaggctcaagtgatcttctgccccagcctcttgagaagctgggactacagacatgtgacaccaagcctggatagttttttaaagaaattttgtagacactgtgtctgcctatgttgcccaggctggtcttgacctcctgacctcaagtaatcctcttgcttgagtctcccaatgtgctgggattaaatgtgtgagccgctatacctccattttcatttctgattttagtaatttgaatcttctctcttttttcttagtcaatctaataaatgattgtcaattttgttgatcttttttgaagaaccaacttttggtttcattgattccttctattgtttttcaattttccattttatttatttaaactctaatccttattatttccttcatgtactatctgtggtttgaggtggttctttttctgtatcctgaagttgtaaagttaggttgttgatttgagatctctctttatatttaatgtatttaccattaaatttctcacacaagattcttaacttctctgagccttcaattcttcaactgaaaattgtaataattctcatcaccaggaaatggaggaaaaatgaaaattgcaataagaatgactgtttaacagtattgttttaaagatttaatgtaatattcgattaagctttcagcaaaatgctacacacagagggaaacttcataaatattagctgctattatcactactgttattattagcttgaagttaggcagttctagagccaaatcctagatccacttctcactaattatatgactttggataagttttttcaccactccaagtctctgtcatttcatctgtaagatggaaatcatgcctacccaacagggttattgtatggatcaaatgagatgccagaaaagcatttacagtagctaacatagcattaatcatcagcctgagttgactagtgagagccaagccccaaatgaaaacccactaggacatggttactggctaaaaatgggggagagaaaaaaaagttaagtgcaaagaatcaagcctggtatgttagttttcatccactgagattcagccaagatggaattagaggtgcaagataatttaccggggggaaccaccatgaggaaaagtggagtagaagtgggaggagcctgagagagccctcagaccacgatgcagatctgattcctgagaaggagaaagaggagagagttttagatagtgatgcagttctcagagtttccacaaggctggtggggcgtcctcaagcccctcacccatgagagagaagcagagtcccccagaactgggcttttcattcccctggtgggagcccatgagaagcgagttctctgtgcaacggacttagtaaatacagaatgcactagcctgggccttctgccaatcaagtccctgccacagagacccaacagacttatttatgcctaccacaactgagacactgagaaaaagatgcaaccatgaaaagatagaaagttctaatgacacgcaaaaatagcaatcagactttctcaaatttcaaagccttcagaaatagctgagtgcagacaggccagggtggaattgacagaagactgatcaccaactagcaacacagtgagagagaaaaaattgcaactttcccacaaaactaatgcattccttgaagcaacaagtagagactgcttcatgctgagagctggaacctggggcaccccactgtaaaataacatcacattcattccttctcttttctttccatgacggacgattcagcatctggaacttctcctggtctctcagctggggccactgtcggcatcatgattggagtgctggttggggttgctctgatatagcagccctggtgtagtttcttcatttcaggaagactggtaggtataatggcctttcctcttgttctgtttcctgcagtgctgactgccatgcttgggagagggaagggatttcttcacctgtatctgggactggatctcttcctcctacccccaagctcctgcttctcagcactaattcctgcaggtctcttcttccctggtcttcatgctccctgtacgccactgtctcttagatataattatccccaccctctgctcatttgtttcccagattcaatacattgtcaaagcctcttggtccttttttaacatctcacacttgtgtcattctctccattcccataaacctcaacaactgctcaaagtcctgcttgaccccttgttgccagtctttgaaatctttcttgcatatgactgcctcattaccttcctaaaatctagttcactcgcctactcaagaagacacaggggcctactgtggtgtattagataagttcacatttcttctctttactaatcttttttacttcctttaccaccactcccttatataattccatcatcctaatagatctgtttccctacacatccctgcctctccaccccacatgtacacagaattcttagttccggtgttacacctaaaaacatgtcaaacagggtgacctccttccactgtctgcactgtggagttacccacacccttaatcacaagcaacttctgacctcatgaagaacaaagactgtagcattaacctgtgagtcttaagctcaggacacaactgtgcctgtgactgagaaccttttcctgataaccaattcatatgttcataacagatacagaaatgaagaaggcaaggtccttaattctataacaggagacaaaacctgaaaaataatcataatgccaaaatagaaaggagtgaacatcacaagaaattagagaaatctgacggaaaatatagctacacattggaatcactcagaaacattttataaaatggatacttaagtcccaccgataaattccgatttactggtctggagtgggacccaggcattcgtaatttttaagcctccccagatgctactaatgtgtagccaggatggagaaaccctgttctaaataggtaggacttggggctaaacccatgactttcagctaggaggattagaattgcccatggagtttttctggctgggcacggtggctcacgcctataatcccagcactttgggaggccaaggcggacggatcaggagttcaagaccagcctgaccaacatggtgaaaccccctctctactaaaaatacaaaaaaatcagctgggcatggtggcacgtgcctgtaattccagctactcagaaggctgaggcaggagaatcgcttgaacccgggaggtggagattgcagtgagccgagatcgtgccactgcactccagcctgggcgacagagcaagactccgtctcaaaaaaaaaaaaaaaaaaagaattgcctgtggagtttttcaacatacgtaagcctatactttgttggccctgttcattaatgggctccaccaggaaattaggaatctagttgagaaacagaagctgaatggaaaggccaccttatttgatatgttaaattatatgggaagcactgtcaaatcattagtgatgttaaaccttctctaagttatatttatgagtatgttattgatgtattccaaaagttatataagaaattctagaaatctaattggttatcagccataatgtcatatgccacagaagtaactaaatttctatgtgagttgtgttcttattataataaattatcatcagatttttaactgtactcattttaaatctttgtcattcacagacagttgttttgcttcttccttaaagcatttgcaacagctacagtctaaaattgcttctttaccaaggatatttacagaaaagactctgaccagagatcgagaccatcctagccaacatcgtgaaaccccatctctactaaaaatacaaaaatgagctgggcttggtggcgcacacctgtagtcccagttactcgggaggctgaggcaggagaatcgcttgaacccgggaggtggagattgcagtgagcccagatcgcaccactgcactccagtctggcaacagagcaagactccatctcaaaaagaaaagaaaagaagactctgacctgtactcttgaatacaagtttctgataccactgcactgtctgagaatttccaaaactttaatgaactaactgacagcttcatgaaactgtccaccaagatcaagcagagaaaataattaatttcatgggactaaatgaactaatgaggataatattttcataattttttatttgaaattttgctgattctttaaatgtcttgtttcccagatttcaggaaactttttttcttttaagctatccacagcttacagcaatttgataaaatatacttttgtgaacaaaaattgagacatttacattttctccctatgtggtcgctccagacttgggaaactattcatgaatatttatattgtatggtaatatagttattgcacaagttcaataaaaatctgctctttgtatgacagaatacatttgaaaacattggttatattaccaagactttgactagaatgtcgtatttgaggatataaacccataggtaataaacccacaggtactacaaacaaagtctgaagtcagccttggtttggcttcctagtgtcaattaaacttctaaaagtttaatctgagattccttataaaaacttccagcaaagcaactttaaaaaagtctgtgtgggccgggcgcggtggctcacgcctgtaatcccagcactttgatccgccgaggcgggcggatcacgaggtcaggagatccagaccatcctggctaacacagtgaaaccccgtctctactaaaaatacaaaaaaagttagccgggcgtggtggtgggggcctgtagtcccagctactcaggaggctgaggcaggagaacggcatgaacccgggaggcagggcttgcagtgagccaagatcatgccgctgcactccagcctgggagacaaagtgagactccgtcaaaaaaaaaaaaaagtctatgtggtcagtcactactcttgctgcagttatgaaaagaatgaggccaagtctgatgaaaataaacttattttgaaaacaaatttgtcttattgggattatctttggtagaaatagagatgcctatgaagagaaattatgttgaaaaaaaactatagtacacctgttatgagactgtcactttgtacattgttgagtttttattatccacctgtagactagagtggaccatgaattcttccactttcttcaatcccattttctaccatggaatcactaagagcaaagtctgctctgttcctgaagctctataagctacagatggataactcaatgtaaatttcatgggaaaacactcatgcctaaggtgtgggccactcagagctcaccagtatgttcaacactataactagagacactgaaactgcaaaccaggacaagaaattgacaacttcacgctgtagacagctttccccaagatgtcagaacaagacttcctaccatgatgaggctcctacccctcttaatttgtcctagctcatgcctgcctctttcacttggcaggataatgttgtaattagaatttcacaggaagtatcttctgagggtagcttaacagagtatcagatctatgatatcactaccaaatttttacataagagatcctttagtccactcaacggctgacattagcagcatctttaatacaactgtttgttcaaaggcaaggtggtcccttttaaagttacacttctagactcacctgttctcactccctgttttaatgtaacccagccatgagatgccagataatagaattgctacctactagctgaacaggaaagaacctgtgctgattctgacacttcttgttgcacatagataaatacaatgggtattatagagactcagttgcagaaattaacaaacatgctgcttggttaaaatgggtagactcatctggctcattctttattccattttagttggtttgcatcttgcctaaggtgcatactccaaactcttggtattattctcctgatagtcacactagtagtctccctggtgtgctataatctctaaaagctttaaatgtttgcatgcagctatccatcgaatgtcaaatggtctctctttggctggaatgacaaaactcaaaggaatgtgtgatcaggaggacatcataacctatgaatgatggaagcccaaaatgatggtagctgagagtaatgtcagtgctttcagttttggtcacactctcacctaagtgagagcatagagactccaaatagggccactgatgctaaatgttacatactccaactgaaattttaagaaagcagatagatcccaaaacagaccaatttaaaaaaataaaataaattaaaaaataaaaaggccaggcatggtggctaacgcctataatcccagcactttaggagggtgaggcaggcggatcacgaggtcaggcgtttgagaccagcctgaccaacatgatgaaaccccatctctactaaaaatacaaaaattagctgggtgtggtggcacatgccctgtaatcccagctactcaggaggctgaggcaggagaatcacttgaacttgggaggtgaaggttgcagtgagctgagattgcaccactgcactacaccctggatgacagagtgagactccacctcaaaaaaaaaaaaaaaagaaaagaaattccaatctacttaaattaacacaataaggaggtcccctttgctttaatttttataaaaaagtaacctgaattaaactgatgttaaccaatatatttatttctactgctctcttttcttgttcaaatttgacaaaacccactgttctgttattgtatggccaaaggggagttatcactgtatttgtaaagtgggacctgccccaaattacaaatcccaaataaaagccaattagatttataaataaagctgttgtaatcgtgtctcttgatacgagttcacagccagcgatggccagtggagtctctcaggctgcgtcattctcaccctgaccctcctgccttcctctttcacttacaaggacccttctgattacactgagcccacccagattatccagaataacctcccatctcaagattcttaacctcatcacatctggaaagccttttgccaaataaaagtgttatgcactggctccagggattaggatgtggacatttttaggaggccattattctgcccaacacaggtaccttttataaacttcacccacaacaaaaatttgctttgcctgtcttctgtgtctcacttttctgtctgtgcacaaagtttaaggtgaaacacaccagctctgctgtgaactggctggatgaccctggaccactcacttcacctccctcagcctcttctcatctgaagcacaagggtgattcttactgcatcagaaaatttacatgaaagggtaaattaagacgtgtaaggcattagacacagagcctggtacctgatgagccctcggtaaacattcctttcagtcctttcctttcaccatcctatttctgtcaccctcatccatctgctccttcatctcctttctcttcagtgacttactcagtctaagctgccagttagcaaagaagccacacttcccattctctcatgattctgctggaatgttcttgtgataaagtctgttatccacacgagacagcccacattatttatatggagaggtctagttaaaacaagtcctttttatgttcacgtaaaacctatacatgtttcctcttaatttacacataccagtcccaattctgccccgttaatttatacatgcactttcttgttttcactcttcttcagtatttctctttacactttataaatttggatagtacagagacaaaaataatgagctgggccaaaagagaggattcctttagcaagatgaatgctttcctttaaaaagatgaatgctttcttttgccataatgaatgctaatttgcaaggcactcctgaaacctgttcctaggattggcttttagagaaatcatttgactctggctgggcgcggtggctcacgcctgtaatcccagtactttgggaggctgaggtgggcggatcatgaggtcaggagatcgagaccatcctggctaacacagtgaaaccccgtctctactaaaaatacaaaaaattagccaggcatggtggtgggcgcctgtagtcccagctactcaggaggctggggcaggagaatggcgtgaacccaggagacggagcttgcagtgagccgagatcgctccactgcactccagcctgggcgacagaacgagactccatctcaaaaaacaaaaaaagaagaagaaaaatcatttggctctaggacacattctagaccccaggaggtaataacagtgacagaagccacatccactcttagtatgcctgctgcattttcacagaatgttgtgcatgaattactgttccccaatccttccactcctggaggttaagcctcccccttcaacatcttcatctccagctggcctgccaggactatggctgggaaatacctccccaccttccatgcccagggtggcacctttgcccattcccataactataatagctcacactgatgcagcactcactgtgcaccagcactatcctaagagctttctagctagctacagtcctcgccaaaaaatcctgagtgttatcatccccatttttacagattaaaaaaaaactgaggcagagatgtgaagtaatgtacccagtgtcacccaactcatttaacctcatcctccactttatctgggaagaggacaccctaagatttccaagatgtcctgaataacatccaccttccagaatggtttttgccccctctactctcaggatttgacaaacagccagtatttcgttttctgtcttacccttcacttatgcacctgttctctaacgccacactcacaactgcacagcccggaataaaagctggcttttacggacctcaatctctttgggaaaaaaacagggccaggttcccagtcatcataaaaagtcatttgtactctattgtcaactatttgcacagccattccctggccataaatgatgtatagtaccaacaataagtgtaatgagaagaaagcaggaaaagcatgagttcctggaatggtcacaaagaggagaagatttcaaatccagaaacagtcataaaacacacccagagtgtgaggcctctgagcaatgacagccccacctgcctctttccatggctggtggcctctgacttccttctcaacctgccccacccggccttgctttattaaaccgatactaatagcttggaattggggccagaccagtgcacacagcactgagtggtggggtggaggagctgaaaagggagaagagtgtttgacttatgaagacctgactcacttaggtacacatcacctgggcgggaaatggtttagtgaagggctgtgcagaactcatggtgtttatccaaaatgagtgactgaggcaagtgtctaaattaattgtttattgagccagaccttgagggtacaccctaggaaaacacaagtcacagaaaacctctgtggcttgtgttctctctgaagaggttttcaggaggccttaaaggggggaaggcaggtaggaagaggcgggtaggtggaagaatgattgttcttgtctttgttctgtgcctagaaagataagcattatcagcctgaaatcctaaggactaagactaaagccttaggaaccagacttagatttcagaactgaagatacaatcgacatgtccttgttatatggggggatatacatcttaaaaattttaaggccagcaaagaacaatttgtgagggcagtcatccagaaatacctaaggccttttgctttcctatagaggtctgtttaatgtacaatgttttgacacaaggttttatagtaacagcgatccatctggggaaatgatgatgatgttgcatgactcagtctcaaagcttaactttccctttgacctaaagagagtcctgaagtttttctttccctttacatttacctgctacctgacctgctattctctctctctctctctctcttttttttttttgaggcggggtctcactgtcacccaggccggagtgcagtggtgtgatcatggttcactgcaacctccacgtcccaggctcaagcaatcctcctacctcagcctcccaagtagtatctgggactacaggcccatcccaccacactcaactaatttgtgtgtgtgtgtgtgtgtgtgtgtgtgtgtgtgtgtgtatctttttgtagagacagggtttcaccatgttgcccagtctggtttcaaactcctgagctcaagtgatccacccactgcggcctcccaaagtgctaggattacaggcatgagtcgctgcacctggccaacccctgaaattcctcaaaatctttcagagaaagcattatagaagatacgagtttgtgattgtatgtttcatctgatcctacatcaccaggaaagctcattcctaggaagttgtgtctcatggagaagggagtgaagttgcatcagaaaaggaccgaagccaagttacaggaacaaaaggaaagtaattgtggagccctatttgggctacacagctgcctcttcaattaaagcaattctttgagcaatcatcaccctaaccgtttcagttgtatgttggttcgatcgtaatatctggagcagtctatggactagtttttctagagcctctgaagctccttgagattgcagtggcagatttctctggattgtagtttgaattagatgttcaagtgaaccttttgagtagccatacatcagcaggcacaaaggttgttgttatataagttgtaatttctcctgaaattcacttaagttgtctagcttcaggttgcagggctttaggaaaaagcacagttttaatttctaatgattccaagtcagaaaaacagaagaaaaatttgaaagtgttattttcaagacttgtagccaggaaagaattcaggattcagtacaaattgtaaggaaataacaaaactcaaaaacaatgagcaacaccagaatttaataacagctgtactgtagtttcttctgaaacataatgttttctgtctccagttctccatttttacaaaagccaaattatagtaggacccaaattatttgcaaaataagttttagtcttatacttggcctgaaattttcattttggaaagtttgtcaaatatcaaaggtctaagacacttgttcaaaattggtcataggtcactataaaatcatagttattaatttagccaaagtgataattcaaaaattttaagagggaaaaatcttcatttttttcatttatgtatttatttatttatttattgagtcagggtctcgctctgtcacccaggctggagtgcagtggcaccatcatacctcactgcagccttgaccttcagggcttatgcaattctcccaacccagccacctgagtatacgggactacaggtgcatgccaccgcaccttgctaattttgttattgttgttgttttttgtagagacagagtctctatttgtggcccaggctgatcttaaagtcaggtgggaactgaacaatgagaacacttggacacagggtggggaacatcatacaccggagcctgtcatggggtgggggtaggagggagggatagcattaggagatatacctaatgtaaatgacaagttaacgggcgcagcacaacaacatggcacgtgtatacatatgtaacaaacctgcatgttgtgcacatgtaccctagaacttaaagtataatttttaaaaaagggaaaaaaaagatgccacctgtgttaattagcttaggaaaaaaatagacaccaaggtaacacaaaatgatagatatttaccttaggattttatgaggagatttattttctttagataggtcacttttgatttagggtgtgttttccaactggaccgctgagctcaagatggagcccagcagggccaacaaattatttgcagtttgtggggcctaataatttaaatatgggaaaagtgggcacagttggaaagcagagcatttagatctttaaacattaaggattccactgaaccccaggttccccaaaaaaaggaaaatgcaaaaaggaccatgctgtacaacccttccacagttgtactttgctacaaaggcatttttctaattgtttaaaccgtgtctttcttatcaaaacatgcaaagaaatgagtagccttctgaagtaataattatttattgtaaccactgtcagtcatctccaaaactgtagctctcacccctgacccagcagccatcacacacacaaggccgagtatttttacagtacgatgcaatctctgatgcctccagaagccaaaaacatcagataacacaacagaaaagagcagagtgttagacctgagagaaatctggtcacttaaaattcctgaggctccatgaggaaaaacagactttttttaaaaaaaaaaatattttaggtaccttgttatcagattttagctgggacaaacaactgctatttctggtttttgaattttttttttaaccaaagttgccctcccaattaaaactaataaggcttaaccagggttgtgacttaaccaaggatgtacaaggcatatccaaatagatgaatgagccaggcacagtggctcacgcctgtaatcccagcactttgggaggccgaggctggcagatcacaaggtcaggagatcgagaccatcctgactaacatggtgaaaccctgtctctaccaaaaatacaaaaaattagccgggagtggtggtgggcgcctgtagccccagctactcgggaggctgagccaggagaatggcatgaacccgggaggcagagcttgcagtgagccgagatcttgccactgcactccagcctgggcgacagagcgagactccgcctcaaaaaaaaagaaaaaaaatgaatgagtactcccaaaaaaatagtccaaaatcacagaaacataaaaccaaaagggactagtttcctgactagaattaaacccaggctgcagtattaaagcacagaattttaactattagaagagaaggtggagtgccttttattcgtattttctcaggagatctatagcaagcagtttgagcttacaaaagattttaactttgttttaggtcaaatttttgtaatttactcaagagaatttttaaagctagctacaacactatgatgcgtctttttcttttaattttatctttccatcacctatttaaaataaaagatctccaaaatctttttttaatgtaggagtccaatttaaaggatccatcttctggccattagtaattagaatttccaatggtgtactgatcccaataatgaatcaacccagcagtttcttcagtgatgaagcaatcccaaagatctgtcccctcaacaaaataaaatattcactcccaggaatagaacaggacagcaaaagacttttgtttccatagcactaaccaggcaacaacggttggaacaacaaaaaccccttatagatgggacttcttataacaaatcctcctgggagttcaactcatttggaacaaacaaaacaaaacaaaaaaatctcaggtcccagtcattctcaggctgatcacctgatatgactcaaaaatcacacctcccagatggtggggaccaagagcaagtgctcccacttggtcacaaatgaagccttcaaggacataaaacaagatgagagggaattttatttggtacccttctttataaacaacacagaatgaaagagacagaggaaaagactatttctggaaggaaagggattaaacaatataaatattcatatggaaaaatgcaccaaatactacaccacaatctctacacccaggctagtcatacacaaatcttctcccattaaccaaaattttgcagagaaaactgatttttcctgtctgcttgaccagattgcacagggagaagccaggagcctcgctgataataaactctacccttttggtggttgatcattttcctggattcctgcatggccaaaaacaggttatgggggtaaatcaggtttaagtagcaagacaggttattcgagggagaaaggaggaagtctggctaacgaagatggtcttgttatatagatgaaacctcacaggtagcagccctcagagagaacaaatggtaaatatttcattcaggtctttaaggtataaggctcagttcatttttcccagatccagacaaaagaaagcctgtctgtattaatggggattctctacagatgccaatttttcacatgaaagacagctttgcaggccacttctgcctgctggccctctgacagacatctcaaaatatgtcaaaaaatatatttttgggtacaatattcttatttcgttcaactgacaggtgattcccagaggtagaacttgatgttctgcagttgcaggggttttagccaattttgaggccagctcaccataatgtagagctcctgctggatttgaccaagttggaaggtgttttggacactagacagggccaagagttggacaaactcaaaggaagaatgacaaaaaccaaaaacacaaaaagtgattgcactttacatattacatattgttgaacactgtaagcatgaggagagattaaagcaaactagcaataaactttgacctgcagctaccacattttaaaacaaaaccccaacccagctctttatctcagaggggaccaagctgaaggctgctctccattgtcacaggagaaggcaactcaccttccttataggaagtgagcaaagctgcatgagtagaggagttccatggcaaaacaaaactcggatctcaaacaaaaaattgtggggagcagggacctcaagagggagtaggatccagtccttggaaagtcacacatttggtcagagctaaagctcgatagttggtactgagcataaacaggagaatcgctgcaggcctaaggggctaagctccactcagaggatcccttcatggtcaccaaaatgttaaccaaaatgattgactgaggcaagcaagtgtcagtccattgaggtttactgagccagagcttgagggtgcaccctggaaaaacataagtcatagaaaccatctgtggcttgtgttgtctttgaagaggttttcaggaggcctggtatttatacttctccttaaaagggggaaggcacgtaggaagatacaagtagaggaaagaatgatttgtctcatcttgtctttcttcttggatagataagccttatcagtgtgaaatcttagattgcaaacctaaagttagtattgacatgtccttgttttgtggaaggatatacatcttgaaaggtttcaaggccagcaaagaacaatttgtgaaggcagtcatctagagatgcctgaggccttttcaccttcttgtgggaggtctggctataacgtacaatgctttgacacaaggttgtgtagtaacagttgttcatctggagaaaagatggtggcattatgtgactcagtcttcagactgaactatccctttggtgtaatgagtgtgacatgagatttttattttcccttacataattttaggagttgtacttccttgatgctgtctgactgaggtcaaaaggatgggtgtggaaggcatcacacctttctcccatttagaaatccattgtcccttccttctcccttattgggttacattcctctgtccatagatcacgtatttactgagttgttttccacggggaaaaaaatctcaattgaactctttaaagctccaagcatttaattcagttcaagagtgtctctcattttaatgatgaccaggcacaaatatttttaaaacgctctccagaaaattgtgataagagcctctgcacaacccacagtagctttggagagcactgagctacaaaagtgatggggaaggaacctgctacatgctgggacctttatatttccaccttatctaatgtccccaatgatgttttaagtaggcactattatcaccctatcccaagacatcaattaacttgtcctttatctcagaattggtcaaaggtggaaccaggattccgactcacatatttctgaatctaaaggtcttgtttcactgcagagcgattgagcgtacatgaactcaaagaaagacaggatgactgattctaacagaaataaccacacaggcttcaatgaagagtcagggtctgaaacgggccttaggacaaagaacagctcaggaggctgagaagacagttgaaggtattgcgggaaggtgtgaaagaattagaataagttcagacatgaaaacataaaatgtgggtcaagtctttctacacagaccaagggagtagactggggctgtgttatgggggctttgaatggcagcctaaggaattggaacttcatcctatggatgataggagtcattggaaagctttgagaaggtcagagacatgacaaacagcatttccaggaagattactctgacagtgtaaccaaaaagcagattagttgcaggctgcatgtagagtcccactaaccaaagcaaggtctgggccgggcgcggtggctcacgcctgtaatcccagcactttgggaggccgaggcgggtggatcacgaggtcaggagatcgagaccatcctggctaacacggtaaaaccccatctctactaaaaaatacaaaaaattagccaggagtggtggcgggcgcctgtcgtcccagctactcgggaggctgaggcgggagaatggcgtgaatccgggagacggagcttgcagtgagccgagatcgtgccactgcactccagcctgggcgacagagcaagactccgtctcaaaaaaaaaaaaaaaaaaaaagcaagatctgatacaaaaaagtaactttattccaaagctagctttgaggaaggggcacaaagcattctgcctttaaatttgctgcttcgcctttggagcaaaaagcaggtatttttataagttaagagaggaaatgagcgagaatgaccaacaaatgagcaaaagagaaaatgagcagtagataactgtccggtcctcctgctactgggcaggtgtctcctgggcagcagagttggcactttcctggacagaagtaagttataaaaacagtcacctggatatgcttctgacgcaccctccgaaagtgtgtgagttccgaggtggcccaggatggaagttctaaggcaatcccctaaagatgaaaggtccatggcaggtatgctatggtctgctgatcaactgtcaactcttgaggagagacccgtcatggagcacctatctagaagaacttgccccttagggagtgtctggtgatgggggaggtgaaaggttatatatacatttctgaaggactaagtaggaaacggggtgccggaaaaatgagaaaagagagggaaataattaaaccatctctagaaaaatagaggtactcacttccagttttccactgccaagctttattttatctttatgagatatgggtggcacatatgttctgcctgctttttgctgaaagggggcatagtcattggacagcagaatggaaccaatttacttggagttaaaaatatttatgagtacccaggcttatagatgatataggttggagcattatgatgtgaggtctagaaggtctcttggaaagcctgccttgtatttttatatagaggatgtaaaagcaggaagctccaaaacagaggtatattcctatccctgcaagcagggccaatattacaagcagcttttgccactaggatggttctgacccaaatcaggacactacccattggtgtagcaacaatgtggggctatgagaaataaaataattatttctgttaaaataattttaaaaattaggccacctctagaaaaataggggtactcggttacaacagtcttaggcaagataacaagtggttctgaactctggcaacttaatagaattatctggaagctttcatctttttttttttcttttttttaacttctcattttgaaataatttcagactttcaaaaatgttccaaaaatagagtccccatatacttttcactcaacttccccaaatattgttttagataaccacagtgcaaacattaaaatcaataaatgatcactgacattgtacagtaaataaattgcagaccttattcaaatcccttttatcttcccagtgatgtcctctttctagaccaggatccaatccaggatcacacattgcatctcatttttctgtcctctcagtctcccttaatctgggacagttcctcagaatttcttttgccttcatgaccttaacatttatggagagtattggagttattttgtagcatggccctcagtttgggcttttctaatattttctcctgattaaactcagattatgcactttaggcaagaatagcatagatatgatgctgcgccttctccatgcattgtattaagatgccctaagatgcagatatctctgattactggagatgttaactttgagcactgggctaaagttcctccactgtaaaatggctattttctttggaagcatttttaagtgaccaataccccaggccacactatggaccaatcaaatcagacactcctgggaaaaggcacaggcattggtaggttttaaatgccctacagctgactgtaaccagcatccaggattggaaacccacagcttagacagtgaagattagaatcctggaaatcagtcaggaagccattctttgggcctaacatccagttccagacacaacatttggcatgggcccatggtaggggaatggaaggccaaaaatctcctgattgggaaaatgatgggtgagtagactgctgtccaataaaaatagaaggcagggccaggtgtggtggctcatgactgtaatcccagcactttgagagatcaaggcagccagataacttgagctcaggcattcaagaccagcctgggcaacatggtgaaatcccatttctacaaaaaaaaataatagccaggcataggtaatatgtgtctgtacttccagttatttgggaggctggggtgggaagattgctagggtccaggaggttgaggctgcagtgagccatgattgcaccactgtgctccagcctgggcaacagagcaagaacctgtctcaaaaaaaaaaaagagagagagagagagagagagaaggcaaaatgctaagtaaggtgtccagcccttctggagtattttctctccagactatagagaaacctgtattgtagagaaagcacacaccataaaatttaactatcataagcctgatgtgaactcctaattgccactaagaagaaggaaattataaatcatgtgatagaaatatatgaccacatatgcagagatgcacacttccggatacagttgaatgaaaaattcacagaatccacgtcagaggtacaccaccccgccctccccacttggtcctttgtccttaatctcttctgaagtaagagaacgaagactgttgtaaatttcacaaaatagggaagtgtacaaatctcctgtcacctggctgtttaagcaacaggacactgtgctcaacttccctagagttattatcttgggttctccataaaggaatgccatcaatcctctcttcagagggaccatctaataacatgcaaaaggaaatgccaatttcaccaaaacccagaggcaggaaggaccctgacaggaacaatccctaaggtattcacatgcctgccagggtctggtgcagctggtgcaggaggaactgctgctggcaatagctggaaaaaaaaaaaagggacggcagctctaacactcagggggtagtaagaaaggagctcactcaattcaccttcagttctcacacagccaatacccttccagcctccctgtggggcctcactgggaggactggcacataattaaatgccaatacatgggtaaaataatttacagaagggtgggatcaactgggtcagaaaaggttgaagatttcacaaaacgggaaggatttgggttaggccccgaaagactcagccttaagaaagcagacacaaagagaaacagaagcccaagaaaagcatctagccttcctggccaattttctattcagacttcagagagacctttatcgtagtgaaagcaaatgtcatataaatttactatcctaagcctgacatgagctcctaattgccacagatgggacggaaattatgaatcgtgtgatagaaatacacaacgcacgcaaagatacacactttgcaccactctggatgcacaaagatgcacacaggccccactggagatgctagttttgaagaaggtcccaggaagaagagtgggtttgcagatgttattttatttgctcttctcaaacaccatatggggatatttcacaaggaggattctcgtcctcagaaaggggaagtaacttgccaaggttgttggtggatgtgggattagaacctcagtgagtctaacaccggagcccatgccaccaccactaccaccgagagccctgaacagggtatgtgtagggaacaggtaggagcagagagagttaaagcagaaagaaaccattttaaaacagggaagttaggtaagcttgctaaatggggatcatatgttgcagaggcatgaacactagacagtcgtgtgaacttgatcttctgattacagaaaagacaagacaaaagagggtgtgaaaatggggttctgggttcctaagctaaagagatgccaccaacaacagtgaaggagccatgagatgtgtggagaaagaactggatggagaagctgaagccctgagtttaaatgcaaaaagtcataaagtaagggcatggctgtggagggcaagttatattctctctctgcagtttggtatctcttcatctataaatcacatggagtgagaattaatgtctaaatgaccctcaacccttgctactcaaagtgtggcccaccaaccagcagcaacaacatgtccaaaagctcctcagaaatgcagaatctcagaccccaccagaaggatcagaatccgtattttaacaagaacttggggtgacctgtgagcacattaaagattgtgaagcagttctccgaaatgtcttccagttctaaaatgcagtgatttcacactcatctgaactttgtcacctcacaggagaaagaaggaaaatggcatttacattttacctcgttcgtgaccttttcttaatcctaacagcctcttagactcgcccgcatctgggtagaggttttagaaaacaccagagaggcagggctgccaccttgtgactatcatcaggaaacgcacttaactcttaaccagtctcaccagtcaaggacgggacggggctggagcagagagggtatacgggatgaactccaagtcacagatgagataagggagttataaccacccacaaaggctggaagtaactgtcagagggggctcagcctgcatcataaagcaatgtccccttgcaaaggacagtttttataatacttactatgtgatatcagtaggaaatggttccaggtcaagctctgcccttgtaaccttaaaacttactctaacaggtattttcaacatcagcctcagcctgaactctgccagtaaacttgtaactttccaaggaaacttactctactgtaacagttctttttcatccggagacaaaatgtatctgattcgcagtcaccgatcctcacactactctctgtaggctgaataagtctaacagcttttcatacaactgaccttcaaatattggttaagaaaaaaacaaaaccaccatgtgctgcccataccaccattccttggccgtttcccatgtggggtcacctgaagccccacaccctctgatcacgttccaatgggcaagtgaagtgcagtaacaacaacagacactctgaatcctaggagtgtccccagagcagcagagccacaggacccccgtccccgtcctggcgcctcaccgctacctagaagccaaatgccacatcagctgatctggggacgctgacttctcctgcttatgccactgctcagtcatcccacacctgtgcaggtgtctactttttattcagttttatttgtaagaaatatttatctgaggctgggcacagtggctcatgcctgtaatcccagcactttgggaggctgaagcaggtggatcacaaggttaagagatcaagaccatcctggccaacatggtgaaaccccatctttactaaaaatacaaaaattagctgggcttggtggcgtgcgcctgtagtcccagctacttcggaggctgaggcaggagaatcacttgaaccagggaggcagaagttgcagtgagccgagatcgcgccactgcactccagccaggcgacagagcaagactccatcaaaagagaaagataagagaggaagaaaggaaggaaggaaggaaggaaggaaggaaggaaggaaggaaggaaggaagaaagaaagaaagaaagaaagaaagaaagaaagaaagaaagaaagaaagagagaaagggagaaagaaagagagagaggaagggagggaaggaggaaggaaggaaggaaggaaggaaggaaggaaggaaggaaggaaggaaggaaggaaggaaggaaaagattgatttataggagcctgctgtgtactgtcactggagagacaaaggtgaatcacacccggtccctggcttgcagagctccaggctatggacggaacccactcaaagtcagaccattactattcagtgagaaacaccgtgacaggcatcagaaaagggttttctgacccatctcaccaatgccctgtgaaaaatctgctgttggttttctgggctcagtttttctcatttcaagttcagaatgaaaaagagaatgtaaatgtccctgatggtcctttgtgcggtcacagctgtacccggcatgtcctcccagttaatccagggtgctcagggctcccacttcactctgagcgtcctctttcctatcggagctcaccacgtctgcacctgcagcagccaggtggctgcacactaatagaaaatccagcaagtcagaaaacttgatttactcctgtaaatttgaggccagtgaccttgtgacattgaactactcctataacttccctgcactttaatttccacgtctgtaaagtggggcaggtggattcggtcaccctaggtgcagctatatagtgagagctcctgagagacagcagcacatctgatcttctcgcatccaccatctagcaaataccaggcacacactagacgctcaaagcctcactgaatgtgtgtgtgaataaatgactatatgagagccatgtggatcatggacaaagtcaataaatatttttgaacatctaccaagtacactgtagaatagggaaataagtaacccaggcagggtggtgttttctcctaacttcccctgaccaccttcctgaaggtgggaaggactctgtacatcagggagactcttgacacaaataatgttcttgagatgcattgcaagaagtcatgttaacaagaggaaagtccatttgtcttgggggtgttttagtcaatggatctgaaggacccgaagccccctctgatgacacacagggtgcaacacccaccctaagttcatggaggggaaaccagatggagtgagttgacagggagcaggacctggaagaacagggggtaaagagactgaggcacccggagggaggtctgaggagttgctcccaacccctgcggtggcctcggtgtggactgatgcagaactcagcagcataagtaagtaaagtggccgcaccaggctctatgcatacatgggaccatttttcagtaagattttctttctgctaatgggcttcacttttgcccactttctaacacatcaggacaagttaataggttacaaaccatcgttccattcagcagtcatttatagaatactcccaaagtgccaggccctgtgtgagttcaggcaatacaaaaatgaacataaaagctcctgtcctctaagatccccatccaatgagctccagggagcacctctcctacaacacgcccctgctctgcacggccctcctctctgccctccaccaacccaaatcctcctccacctccagctcaagttccacccaaccaagtccctctcagtccccctgcactcctgccactttgagagatgactgcactcatatctctaggttttatgaagtggatgtcatctccctggttagacttgagcctcctgaaggcagagaccatttttagaattttccagaaaaaaagccacatcagtaatttgcatcagaacaagcttagactctgctcaagccttcaacttagacagagactccactgcctagcacagtccctggtccctgcagtgctttataaaccctgcagtagcaaagtccacaatcaactcgtgtgtcagtcaacaggctgggataagttgaaaatgcagacagagaagaacagtcaaacaaaaatcaaagggctttgactcatgccttgcctcttcccttttctcagggaaacaaagtcacaccccctgctctcactcctgcctggaggcttccagggagggctcccttgttagccttcccttcagcccccatgaatatcacccagcattcaagcccagcctctcctctccctttgagcacattgcctaaagtctcaaataaatgtcaagtttagtgagtgctgatattctatgcccctaatgtttacttcaagtattattacctttcttcttttgcccggggccatttccaaacaagggctggagccaggcgccccagcagctgggcaaacacacttcagggctccttccctcctgtggctcctgtttctcaaaccctctgggacctgcagctctgggggtctcttcccccaacccagttccctcccctttagaccagaacaactaagccatggccaccttcccgatggacacacaaggaggcctggtgtcacccactgctccaggggcggtgttctcggcaggggagctgcctcttgtcccggatcctgctctgctgccaccttatgtggctgcagaattggagggaattgtgaacagagagaggacagggcaacttcccaggcaacaacactactattgccaatattttgccaaggatgggagcaggagcacagagggaaaacagaccttgtcaacgtctcctccaccaacacataacacccactttcctgccaaatactcagatagagaaggtcactgaaagtacaagaaaattcaaatgagaaaaaagacttgaggaagaaaccatgaggcattggggtgtggggaggtgggaaggagtacaggagagaactggcatggctgccaagttgtcagtcaccttcttatgttcttaagaatgctgcatttcttttgtttgaccagtttcacttcccagattcccgtaaagcacatggtctaatctgttacctaacagcaggaaagcatgatctcacctgttcttgccctcaagtaggaacactgccctgggactatactgcagaccaccaggctgagccatccccagaggtcaggagcttccaaccgggaacctttcatacactcttcaagcaacgtacagctccaccgacagtcacaataaaaattctaatatcttccctcctcctgttgctgatgtccatggtctctagcagcctgaatccaggtaaataagactgtctatgaaggggaaaacggggggaggaaatggagcaaaacaggccacaggtgcatcaaaatgtagccctttcagctacagggattgggagcaagtgagcctttttcagtgccagtttcctcatttactgaaaggagcaaactgtacttacatctagtgttgtgagggttaaatgagatattgtatgtgaaagtgtctgcaactacagctggcagatatatacatatgtacatattggttcaacgaatatttgctcccatgccttcacccccaagccttttccagaagagtaatgcatttccccagggtcaaacttggtggcagtagtgggagggtattgaaggcaaccatatatttataaaagataaggaactctttgcttatattcttttttttttttttttaaagacaggatcttacgctgtcgcccaagcttggagtacaatggtgcaatcatagctcattacagctcaaactcctgggctcaagcagtcttcctgcctcagtcttccaagtaagtagggctaaaagtgtgcaccactctgcctgcctagtttttcctttttttttttttagagtcaaagtatcactatgtttctcagtcagatctcaaactttgcttgtattgtttatattctttagagtgcaccaagcatgacatactttaatgctattcaatggtagctaataaacggaagaaaatcctatcaccaggtagtgtccgtatttgaagctttagccacaccaagccctgctgcaacagtgcaccatttgggtagcagacctttggctaaggctttctaatctgctccagttttcactacaaccaaagtggccaagccctttgcaaagaaatcatgcagaagacagcttagccccatgtatatttccacttgggagcaccatctccccaagggccactttgaggtgaaacagctttgttacatactcagcgtcaacttggtcctaaaatcaggagatgttcagccttctccactccaatttccaatgttccttgctttgtagagagagcgctctggaagctgctgagccccatagccctggggcctaaaccaccattcaggaagggaaggtttttccatcactgtgacagacacccaggccagagtcctcagcctagactaaaaggtctagccccaacctccgtttccagtgcaaccccctccactcactaaaaattactctctctccacccaaactagactgtttgcccttccctgaacagggcttgtgttttcccaccagttcaactttgcagatacactcaactcaaaaaccatcttcccacaggccagacaagtgctcagctcctcccacacccagacaatcactctccatcctgaaagctggcttagccctactggactctctcttcttgcacttatctgctgccttatattgaagaccttcctgtgtctctcctgcctccacccactacccttagaggttgcagcctccttggcagcacagactggtgcactgtttccatatccctcatgctatccagctcagcactcagcaaccattagctaaccgcacgaatgcgtcctcaggtttctaaatcaaaccagggcttcagagcaggtctactgacaactgggctgaccgattccttgtagtgagggctgttctgtgcattgtgagatgttcagcagcatccacatgccctctctccactacatgccaatagcagccttccccctccctcaagcaccctcttccttcatgaaagcaaaaaatatttctagatattgccaaatgtctccttgagggaaaccacccctagtcgacaaccattgctttataccaatagttctccacctggcccacacatttacacttatctaggcatttaccctcagcctggaagtcaggggggcctagatccaaatcctggttctgtcactccctttgcaaccctggacaagtcgcttcattttttttctagcctttttatcgtcttaagatgaataaataccactgttcacacaggcttgttgtgaagattagatgaacctcagtgtaacctggaaagggttcaataaatggactgaatggaatttctaaagtcgctcctaaagcactagggtgaggaactggggaaagctcgctgcgccgccagggggcgccatcacaaaccacctcggtgggtggcgccgggctcgagctttgtttcccagccaagtagtttgtaatgcgggcctgactctgagctacttagtggctggaagaaataatagcccctccattcccaaaataaatctcaaaataaaatctaatcttattttatatccctttttttttttttttgagatggagttttgctctgttgcccaggctagagtgcattggcgcaatctcggctcgctgcaacctctgcctcctggattcaagctactctcctgcctcagcctccctagtagatggaactattggtccctgccaccacacccagctaattttcatgtttttaatagagacgtggttttgccgtgttggccaggctggtctcgaactcccgacctcaagtgatccgtccatctcggcctgccaaagtgccaaagcgtaaaccaccgccccgagtggctggcattgtttattatgtcgctgatattgtcccaaatttggccattgggagttccttctagttggtttctgtgacttttgacacaaccccatcatttttcaagcagttccttacttctggccccacagaatgtttacttctggccccacaaggctcctcttgtgctttcttgcccagccctggatcagctatttctccagggacccctggttcctttcatgggaaaatgatgtttacagaccatgggcacccatatgcccattgctagtaggtgccggtgcttctatgccctctagtggtcggagctgggaaataacacacccacactagtgtactgttacccacatttcacaaattaggtaaatgaggcacagaaaagttagacaacttgaccaacatcacagagaaaataggtagtagaactggaaaacaaaaataatgacagatgcacaagtcctaacaagcaaaagtaacttcttcacacatgcatgttagcagaaagccacaagcccaatattccagcatagacactctctttggaaaataaccagaattccacagcaataaacacaatgataaccatcacgtactcaacacccgcctggacactgggctcccacatattcccaacaactctgcaaggaggattttaccatcctccttttacaaatcagggaatcaaggatcatagaagccaagtgacttgtccaagtcaacatagttaagtgacagaaccattagctgagcccaggtctatatctggatataaattccatgcttatgccactatataagcatttcccaaaactgattttaggtgaaacataaataaacttttaagtttaactgtgtttattttaacgcatgacaggaaaaaaaattaagcacacatcaaatctctgatttcatggacaatattgcataagacaaaaatattttgtcttcagttcctggcctcaagccatcctctcacctcaacctcttgagtagctgagatcacaggtgtgagccaccaagccctgctaagacaaggatgttttgtaaactaaatttaattacaaaaaaagtatgaagtaaataataataaaggtggtaaagctgtagagaaaatcataaagttggtctagaaatgtctggggtctggatgacataatactacagcaccatgcagcttcattctcagttactcccaggaaattagagtcacataacactgcagaaagaacaattcagaatcttagacccgggctttagccctggatgtgtccactcctaggaccccaaacatctctgtgacctccttgctggaggtaaatccaaccttcccagacgtgtgagaacactaggaacatcctgcacacatagaggggtttctctgtcacagagaaaataacaccaggtttgaggaccccagggactctctgtgtggtgctgacagacccaaggcccagacacagcagaggtccgtgctggggagggcgggtcgtcctgttatggaacaggggtccaaacaagcttgcttctcagagcatcttctggggaactgaatataaacagaaagggaagaggaggagggacaaaagagacagaaatgagaggggaggggatagaggattcctgaacagagaccgcacccatgacccacgtgaccctgggaaatgcttctatccctgagaggaggctcagcacagaaggaggaaggacagcagggccaacagtcacagcagccctgaccagagcattcctggagctcaagctcctctacaaagaggtggacagagaagacagcagagaccatgggacccccctcagcccctccctgcagattgcatgtcccctggaaggaggtcctgctcacaggtgaggggaggactccctcggagtggatgggaggagggagcacagagactggctagggtctcctggggaggacaaggctctgagaggagacagagggcttttgttgaagcctgaggaaacagaacaccagagagggacaggggtcacaacaggaaagtcacactaaactgggattgataaaaagggaggaaaatcaattgatcatgttttccaagttaatcatcatttgtcattaccatttgaaaaaaaagaaaaatgatagaaatcagaactgcattaggatgacactccaaataaaaatataacaaggaaactaaatgctgcccttactcaccaatcagaagttgaaaaataaccaccagatacactcattaactcatccacaagcatttgcaatcaattttagtcaatggcatacaacaagcatcagacaagtctcagtcatcacagagcttatgctgtcatgaagaggaaaacacacacacaaagagatatagaatgtgaggtcaggtgttgacaagagccctggaaggaacagagcagggaaaggtcagaaagaaaagacccagggtctgtagagggggtgtcagggaagggatctcccaagaatgccctgatgtgagcaggacctgaggccagtggggagggagccatgcagacccctggggaagagcattccacacagggaaatgccaaggtcaaaggtgctgaaggaatgggggtgtcacactgctgactttgactcagtaggacacacacacacacacacacacacacacacacacacacacgctccaacgtggaggggtgaagagacctgctcaggacccagggccctgtttttccaccctaatgcataggtcccaatattgaccgatgctctctcctctctcctagcctcacttctaaccttctggaacccacccaccactgccaagctcactattgaatccacgccgttcaatgtcgcagaggggaaggaggttcttctactcgcccacaacctgccccagaatcgtattggttacagctggtacaaaggcgaaagagtggatggcaacagtctaattgtaggatatgtaataggaactcaacaagctaccccagggcccgcatacagtggtcgagagacaatataccccaatgcatccctgctgatccagaacgtcacccagaatgacacaggattctataccctacaagtcataaagtcagatcttgtgaatgaagaagcaaccggacagttccatgtataccgtgagtatttccacatgacctctgggtgttgggggtcagttctacttcccacatacgggattgtcaggcctgggttgtgcctgtggccctctctgcattacatcctgtatcagggtttggacatttagtgcaggacacacacgggggagacaaacttccacagatcagaattcctttcctggatccagaccctgcagacactcgctgcagaggaaggacagtctgatggggggactcagcagggcgaggtcagtgtcagacaagcaccccatggtctccccatggacctgaccctgagaaagaccctggagaactggatcagggcctggcctgaggggtccccctagggacccctcagagagaagctcaactcttccctgaactgagcccctgtacaaagccctgtccctggttcctgattccaggtgatcctggggagtctgtgccagggctgtgtggtggcctcttgggcagggctggctgggagcaaggatgtgagctatccaagggccatgactcctggagttggtcaccagccaggtccgagcacccagagcctcatctagctgaggatagggcctcctccttcacttgaggctcagcatggaaaggacagatggaaaaaattactagtgcatgagcccactgccctgggggacacaggttactccctgggaagttcagagtccccaaggggaggaacagagaagagaggatgctcctggcagctccatgtccaccagggatcaggcccagggccctctgtcttggaagcaaataatcatagataactgttcacttgggcagctcctctgtgcagagctgagatcaagtaattgtaaatattttgaggttaactcacaaacaacctcacagccaaatagcacttatcctacttatagaaaggaaattgagggacagggagacagtcactaacaagggtcacacaggccataggtggcagattagagacatatgaggtctgtctgcagccacagccccctcctctcctcaaccgggggtgatggggctgtttgttgttaggcatctgcatctgaggccagtcatgggttcacttccttttgtcttgtgcatccgcagctcagaagtggagattctggtctggaaagtaagaagcaaacagagaattaatcagttttactctagaactaaatcacctgcctcaaataacagagtcagtgctgggattgtccaggcctctcccttcgatccacagtcccctcactgcacctgaaatcctgtttcccgatgtgtgggtgtcactcccatgggaggataaaggagaggactttgctttctctccccactcacaccctgcaccagcacaggcccaaagtgagacacacgctcgctcaggagttctctcttgaaaaagggaagaaaggaagaaggaatgaaaaaaggatccataacctctttagagaccggctcctggatgcagaatcctatgaggttctggccacacctgtttcttgtccctcaggggctgacacccatgttccatccctctgaacccctgtccctaaacctaccccatctcatgtgactctggggttccttggtcattagagggttttcaggtctccctggtcctggtctggggcagccaagaggctcctggtccctggggtctctgaggtcactgtatcccccactgctcactgccatgggtatctctggctctttctgctcctctctgtccctcattttcctcccctttcattctagctgggatgccctgccctgcacagcttcctccacccttaggccttccccagaaaacccctctaacaaggctggctgtcctgttcccttcctgctcacactgtgtcctggcccacatcccaggcaacagagaaggcacagaaatcagccggagcagccgcccctgccgggctccatcacgagccaatgtccccaagtcaacaggagaatgagcttccactgtgtccccatccagggctctttcccccagtgaggccgacatgtggaacaggccacgggacagggacaagcgactcctccatacagtctctactgactcaccaggcagtcagaggcaggatgacaggtctgctttccccaaggcccagaggctaatttcatccattgacttccgtcctcatcttggtgtgaggctcacatcctccagtcattccccaggaccttccccaggtggagccggccaggcaggtgctgtctgatgggtttgctgcccattccacatacactactgtgtcctcatgatgatgccattgtcataaggtggggtcccttggactgagaagtgcaccagccactggagtctcacatagactctgcccagtttagatgaacttaaactctcattgtgttttctcaggttaacaggagaggaagaaagcatttcacatgactgtttggggctccttccctatttgcctaactgcacaggaattaggggcagggagctctttctaaatttactaacataacacacgttgcttctaatttggcatcgttccttcctttatgtaactgacacacacctaagacttcctctcctactggttctatcctcctaagaggactcatatgcctctctctactcaaggagttgctaatttcaaaccaacttcagcatcttcatttgacgacaatatgatcctgctggaattcacagcacacctaaaccttagtatgttatcaagaaaaatactacttccagcccttgatctttgatctttaggacattagtaacgatctccacttatggaaaaaattaaatgtttcccccaaagttcttttattttttactatattcagaacataacatgaggtctaaactcctgacaaacttttcaaagcaaattacaacactacaggtcaagcatcccacatccaataatccaaaatctgaaatgctcccaaatctaacactttttgaccactaaagtgatgctgaaaagaaatgctcactggagcattttagattctgggttttcaaaattagggtgctaaacgggtaagtctactgcaaatattcaaaaatccagaaacagtcagaaatccaaaacacttttggtcctaagccttatgcgtaagtgatactcaatccgtatgaactataggtaccaagctgtacagcaaatctctagaacctcatcctgtgtataactgaaagcgcacacccattgactaactccccattctgcctctcccaatccctggcaaccatgattctactctgattccatgagtgtgactactctagggacctcatataagtggaaccctacagtatctgtcctgtgagtgacttattgcatttagcataatgtccaatgggagaaaatatttgcaaaacttctcctcaaatttctgtctcatatctgtcaaacacacatggtccttgagagtcagatttgcagcatttcatgctccccctttccaccactcagctgtgcatttgcaaacatccacatgtgtttatggagagagccacagggtcctcacctgccctccgcagagggagaagaaacattaaaggccaaagaaaaggaacacggttctgctgggaaattcaggcagctcctgcctgtccccctcactgtcttctagatcattctctgaattctgctctatctgtaggtgtcacaggctcaagtcagtcattattaaacacctgggaaaaactgccccacctgtggttccactgcctgatgaccgaactgacctccaggcttgcccctggtgtcccctgtgttatttctgctgaaaggtccaatcccaggccaggctgcacagtatccttggggtttaaggacaataagaagtcccatcatcacccatctctagaatgtccttagaaaaggaagccacacagaaaatacagctaggggggcaaagtaggactaaagcttgaaaagacccagcacctgaatgtttcaggtgaggactccaagggaagccaggcaggcagctggtcagggagaaaccaggagaagcacaaggggctgtgaccccgggtcctgtgtctgtccatgacccaatgctgctgctcaattcacacttgagaaagactgtgcttctcccacacagagcaggtgatctcacacaatctcagccctcaaatcatcgtgcatctgttgtgtgacacacacacctgccaggggcttttaaggactcaagggggctgagaggtgagagatgccaactctgattgaaagatgcctgtggaggaatcaaaggtgccacacagggcaatcttctctctgttttctgcacagcggagctgcccaagccctccatctccagcaacaactccaaccccgtggaggacaaggatgctgtggccttcacctgtgaacctgaggttcagaacacaacctacctgtggtgggtaaatggtcagagcctcccggtcagtcccaggctgcagctgtccaatggcaacatgaccctcactctactcagcgtcaaaaggaacgatgcaggatcctatgaatgtgaaatacagaacccagcgagtgccaaccgcagtgacccagtcaccctgaatgtcctctgtgagtatcttctgttcctctgtggcccaggctgccagcccaaatccacacagccagagtccaggtctctcagtccctctcaggtctaaggactcagaccctcacccaggctggccatgacttcctgccctgagcaaacctgggcagaccaggccttgaccaagaatgggaggggaggggctgtctcctgtgctacttctgctcaaacacccattcccatcatcactcatctccaggatgtccttaaggctcagggttcacattttctgatgggagaaacaggtgaatgtctcagactttggctcaggggacatagcgggggtttggttgagacttcagggttgtgacatggctcagggggacaccgtggcccttccacagaccaggaacttatgcttccctctgacaacatcacctgtggctttattctgtttcctccagatggcccagatgtccccaccatttccccctcaaaggccaattaccgtccaggggaaaatctgaacctctcctgccacgcagcctctaacccacctgcacagtactcttggtttatcaatgggacgttccagcaatccacacaagagctctttatccccaacatcactgtgaataatagcggatcctatatgtgccaagcccataactcagccactggcctcaataggaccacagtcacgatgatcacagtctctggtaagtggatccatgaagcactagcatcacattttcaggtggagtctggctctcagagaagagccaggaagaaattttctttcccaacctgtgtccaaggggcacacgcaaatcccaaattctcccctgaaccctcccaattcacctctgcagactcttttccccttgtttttttgttttttgttgttttttgttttttgatttctcatgtctgactttgggtccatcctggaatgagaggagggggctccctcagcactgagccctgtgtagtgaaaggggcttcacagagaaaaaaggaggaagggtcctcagggtcaagttcctgctctctgtcaccaacaattccctttctgtcacttctttgtgttcttttacctactccataagctacaagggacaaggaggttttgaaatgagctcacactttttccttaaatgagaagaggaagccccttgggtgatggaggagcagctcagactctgcccccatctctgctcccagcacccccagtgactgactgaccccaccctgaagccacctaaggtggaaccagggcatatggagaaggtgcccaggtgtctgtcctgaatcaggctaaatcaagatgctaatcaacaccaaagcctcccctggatcaggccgcaggaaaatgggaagacatggagcctcatgacagactgctgagctgtgtcctggctctgaagtcactggctgtataagactgtgggcacagcacatgggacacagcacagaggacagcaagtgacgcacacttggagacatagggagattcagccatggggactctgcatggcagggaaggggcagtgacaaaaagtgtgtatttatagagaggataagactaccagccactatgtatctaatataggacttaccttttcaacccttccacgtgtgcaggtccgtagtattaaacacattcccgttgttctgctaccatcaccaccacccacccacagaactctcttcttcctcccaaaatgaaactctgttcccatcaaactcctgggcagagctgcccacctgtgacccacagcctgacccctgaactcacctctagacttgcttctggtctcccgctcaaacccccatccccatcatcacccatctccaggatgtccttaaatagcaaagcctcagaaaaaacacaccttggctgggtggtgtgggactgtgcagctgaaagaaacagcacctgcatgttccaggtgagtaccccaaaagaccaggcagtcagccagtcagggaagaaacaggagaggtgccagaggctgtggctgtcagtcctgtatctgcccaagactcaatgcttctgccctattcacatttgagaaagtctgtacttctcccacacaaagcaggtggcctcgatctccgagccctcagatcgttgtgcatccgtcttctgacacacacacctgccctgggctcttaaggacttgggtggactgaggggtgggagatgccaactctgactgaacgatgcctgcagaggaatcaaaggtgccacacacggcaatcttctctctgttttctgcacagcggagctgcccaagccctcggtcaccagcaacaactccaaccctgtagagttttctacatataagtttaagttatctgtgaacagagataattttacttctttccgatttggatgtctgtttatttgtttgtttgctgcctaatttctccagctaggacttaaaacactatgttgaagagaagtggggcaagcaggcatccttgtcttgctcctggtcttacagggaaagctttcagtctttctccattgagtatccctctattatgttgaggtggtttccttccattcacagagtgtttttatttataaaagaatgttgaattttgtcaaatgcttttattggctaaatcttattactaattataggtctattcagatttttttgtgtgttccaggaatttgtccgtttcatctaggttatccaatttgttggcatacaattatttaccgcactcttttaatctttattatttctgtagaattggtagcaatgtcatcaatttttttgagagtaggtctcactctgtaacccaacccaagctggagtgcagtggcttgatcatagcttacttgcaggctgaaccccctgggctcaagtgatcctcctacctcagcctcctgagtagctgggactacaggcatatgccatcatgcctggctagtttaaaaaaaaaaaaatgtggagactgtgtcgccctatgttgcataggctggtcatgactttctggcctcaagcaaccctcatcctctgacctaccagggtgctggaattaaaggtgtgagccaccatgcccccattttcatttctgattttagtaatctgaatcttctctttttttctcagtcaacctagtaaatgattgtcaattttgttgatctgttttgaagaaccaacttttggtttcattgactccctttattgtttttatagcctccattttatttatttcagttataattcttattgtttccttcattcactatctttgggttgattttgttctttttctatatcctgaatttgtaaagttaggttgttgatttgaggtctctctttaatgtaagtatttaccactatcaatttcttgcacaagattcttaacttctctgagccttcaattcttcaactgaaaattgcaataattctcatcactaagaaatgggtggaaaaaatgaaaattgaaataacaatgcctgtttcatagtatcgttttgaagatttaatgtaacatttgattaagccttcagcaaaatgccacacacaaagaaaagcttcacaaatattagctattattattactactgttaccattaaccttaaagtcaggtagtcctagagtcaaattctaaatccacttgtcactaaccatgtgactttggataagttttctcatcaccctaagcctctgtcttttcatctgtaaaatggaaataatgtctacccaagagagttactgtataaatcaaatgagatacaggtaaagtatttagcacagggcctggtatctaggacatgcccctcaacagtagctaacctagcattaaccatcgcactgagatgactggtgagggctaagcaccaaatggaaactcactaggacatggttactggctaaacatgggagagaggaaaaacagtgcaaagaatcaagcctggtatgttagctttcatccactgagatgcagccaagatgggattagaggtacaagataattcactgggtaaaacagccatgagggaaggtggagcagcagtgacaggagagcctaagagagccctcagaccacgatgcagatctcattcctgagaaggagaaagagaaggagggaagttttacatagcagtgcagttctgagtttccccaagaccgatggggagtccttgaacccctcacccatgagagtgaagcagggtctcacagacctgggcttgctttctttcccctggtgggagcccatgggaagtgagttctctgtgcaaagaacatagtaaattcagaatgcactagcctgggccttctgtccatcaagtccctgccatagagctccaacaggctcttattcatggctgccacaattgagacactgagaaaaagatgcaaacataaaaatatagaaagttctaatgacatgcaaaaatagcaatcagactttctcaaattttcaaagccttcaaaaatgtctgagtgcagaaagaacaggatgaaattgacagaagactgatcaccaacctagaaacgtggtaagagagaaaaaaaattgcaactttcccacaaaactagtgtattccttgaaggaacaagtcaagcctacttcatgttgacagctagttcttggggaccccactgtagaataacatcaccttcattccttctctcttcttcccacaaggaagtgctcctgtcctctcagctgtggccaccgtcggcatcacgattggagtgctggccagggtggctctgatatagcagccctggtgtattttcgatatttcaggaagactggcaggtatgatcgcctttcctcttgccatgtttcctgcagggctgaccaccatgcttgggaaaggaaaaaaacttcttcacctgtatctgggactggatctccttctaccgctaaactcctgcttctcagcactaattcctgcaggtctcttcttccctggtcttcatgctccctgtaccccactgtctcctagatataattatccccagcctctgctcatttgtttcctagagtcaatacattgtcaaagcctcttcgtcctttttcaacatctctcacttttgtcagtctctccattcccatcaacctcaataattgttcaacatcctgcttgaccccttgttgtaaggttggaatccttcttgcatatgactgcctcattaccttcctaaaatctagttcactcacctacttaaggagccaaagggggccaggcacagtggcttatgcctgtaatcccagccccttgggaggccgaggtgggcggatcatgaggtcaggagatacagaccatcctggataacacagtgaaaccccgtctctagtaaaaatacaaaaaattattcaggcatggtggcgagcacctgtagtcccagctactcgggaggctgaggcaggagaatggcgtgaacctgggaggtggagcttgcagtgagccgagatcgtgccactgcactccagcctgggcgacagtgcaagactccgtctcaaaaaaaaaaaaaaaaaaaagaagccaaaggaacctgctctggcctactagttaagttcaaatttcttctctttactaattcttcttactttctttccctctacttcccagtataattcctccatcttaattagaatctgactctctacacatccctgcccctttaccccggatgcacatagaattcttagtttcaatgttacacctaaaaacagggtgatctcccctccactacctgccctgtggacttactcacacccttcatcacaagcaacctcttatttcatggagaacacagactgtgtagtattaatatgtgaactttggacacatcctgcatgtggctgagaaccttttcctgacaatcaattcatgtgttcataacagatacagaaatgaagaaggcaaggtccctacccccagggaacataaagcccaagacaggagataagacctgaaaaataatcatgataccaaagtagaaaggagcgaatgccacaaaaattcagataaatctgatgggaaatatagctacacattggaatcactccgaaacatttttaaaaacggatgctcaagccccaaccataaattctgatctactgatctggagtgggacccaggcattggtaatttttaagcctctccagacgctactaatgtgtagccacgatggaggatccctgttctaataggtaggacttggggctaaacccatggtttttagctaggaggattagaattacctctggagctttttcaacatacatgggcctatactttgttggcctaattcattaatgggctccaccaagaactcagtaatctaactgagaaacagaaactaaaaggaaaagccgccttatttgatatgttacattatatgggaagcactgtcaaatgataagtgatgctaaaccttctctaagttatatttatggttatgttattgatgtgagtgttccaaaaattataagagattcccagaaatctaacagattataagccataatgtcatatgccacagaagtaactaaatgtctatgggagatgcattctttttttatttttatttttatttatttttatttttttttattgatcattcttgggtgtttctcgcagagggggatttggcagggtcataggacaatagtggagggaaggtcagcagataaacaagtgaacaaagaaacaagtgaacaaaggtctctggttttcctaggcagaggaccctgcggccttccgcagtgtttgtgtccctgggtacttgagattagggagtggtgatgactcttaacgagcatgctgccttcaaggatctgtttaacaaagcacatcttgtaccgcccttaatccatttaaccctgagtggacacagcacatgtttcagagagcacaagtttgggggtaaggtcacagttcaacaggatcccaaggcagaagaatttttcttagtacagaacaaaatgaaaagtctcccatgtctacttctttctacacagacacggcaaccatccgatttctcaatcttttccccacctttcccccttttctattccacaaaactgccattgtcatcatggcccgttctcaatgagctgttgggtacacctcccagacggggtggtggccaggcagaggggctcctcacttcccagtaggggcggccgggcagaggcgcccctcacctcccagacggggcggctggccgggcggggggctgacccccccacctccctcccggacggggcggctggccgggcagaggggctcctcacttcccagtaggggcggccgggcagaggcgcccctcacctgggagatgcattcttatcataatgaactctcatcagatgtttaaccatactcattttcaatctttgtcattcactgacaattgttttttgttttgttttgtttggtgggggggttgttttttgtttttgtttttgttttgagatggagtttcactagttgcccaggctgaagtgcaatggcgtgatttcggctcaccgcaacctctgcctcctgggttcaagcgattctcctgcctcagccccctgcacagctgggattacaggcatgcgtcaccatgcccggctaattttgtatttttagtagagacggggtttctccatggtgataaggctggtctcgaactcctgacttcaggtgatccacccgcctcagcctcccaaagtgctcggattacaggcatgaaccaccgcgcccagccccgacaattattttgattcttccttccttaaagcatttgcaatcagctaccatccaaaattgcttcttcattgaggatatttacagaaaatactccgacatgtactcttgaatacaagtttctgataacattaaaatcataccattagactatttaagaatttccaaaattttaacaaactgatagcttcatgaaactgccaaccaagagcaagcagagaattcatttcatgagactaaaagataataatgaaaataatatttttatgattttttatttgaaattttgtggattctttgttttgtttcccagatttcaggaaacattttttcttttaagctatctagagcttcaacaattttgcgaacaaaaattgaaacatctatattttctccctacctgactgctccagaattcggaaattattcatgaatatttatatgtttataataatatcgttatttgcacaaaaaatatagttattaatattaattgttataaaataattattattgataaacaattatttgatgatcattatttaataatttattaatatttattaataaattaataattattatttaacgactaattgtaattgttaattaatattaatattatataataaatataatagtatagttatttgctcaataaaaatctgctccctttataacaggatacatttgaaaacactggttatattacccaggctttgattgggatgttatatttgggaatatacatagatgaacccataggcactgctggcaaagtctgaagtcggccttggtttggcttcctcatgtcaagaggtttctaaaagtttaatctgagattccttataaaaacttcctgtaaaacaaacttgaaaagaccccaggctgggcacagtagctcacgtcgataatcccagcactttgggaggccgaggtgggtgaatcatgagatcaggagttcaagaccagcctggccaacatggcaaaacctcgtctctgctaaaaatacaaaaaaaaaaaaaaaaaaaaagctaggtgtggtggcgggctcctgtaatcccagttactcgggaggctgaggcaggagaatcacttaaacctgggaggtagaggctgcagtgagctgcgctccagcctgggagtgcatacataggcctatactattcatgtgcgtacatgggcctatactattcatgtgcatacatagggctatacataggcctatactcctattcaaggagaatcgcttgaacttgggaggtggaggttgcagtgagctgcactccaacctgggcaacagggcaagactctgtctcaaaaggaaaaaaaaaagactatgtggtcacctgctactcttgttgcacttatataaagaatgaggccaagttcgatgagactaaacttatttggaaaacaaatatgtcttactgggattatctttggtagaaataaagatgcctatgaagagaaaaattatgttgaaaaaaactatagtacacctgttatgacatcacagctctgcttattgttttttattttcattatccacctatagattggaccagaccctgaattcttctagctcctccaatcccattttatcccatggaaccactaaaaacaaggtctgctctgctcctgaagccctatatgctggagatggacaactcaatgaaaatttaaagggaaaaccctcaggcctgaggtgtgtgccactcagagacttcacctaactagagacagtcaaactgcaaaccatggtgagaaattgacgacttcacactatggacagcttttcccaagatgtcaaaacaagactcctcatcatgataaggctcttacccccttttaatttgtccttgcttatgcctgcctctttcgcttggcaggatgatgctgtcattagtatttcacaagaagtagcttcagagggtaacttaacagagtgtcagatctatcttgtcaatcccaacgttttacataaaataagagatcctttagtgcacccagtgactgacattagcagcatctttaacacagccgtgtgttcaaatgtacagtggtccttttcagagttggacttctagactcacctgttctcactccctgttttaattcaacccagccatgcaatgccaaataatagaattgctccctaccagctgaacagggaggagtctgtgcagtttctgacacttgttgttgaacatggctaaatacaatgggtatcgctgagactaagttgtagaaattaacaaatgtgctgcttggttaaaatggctacactcatctgactcattctttattctattttagttggtttgtatcttgcctaaggtgcgtagtccaactcttggtattaccctcctaatagtcatactagtagtcatactccctggtgtagtgtattctctaaaagctttaaatgtctgcatgcagccagccatcaaatagtgaatggtctctctttggctggaattacaaaactcagagaaatgtgtcatcaggagaacatcataacccatgaaggataaaagccccaaatggtggtaactgataatagcactaatgctttaagatttggtcacactctcacctaggtgagcgcattgagccagtggtgctaaatgctacatactccaactgaaatgttaaggaagaagatagatccaattaaaaaaaattaaaaccaatttaaaaaaaaaaagaacacaggagattccagtctacttgagttagcataatacagaagtcccctctactttaacttttacaaaaaagtaacctgaactaatctgatgttaaccaatgtatttatttctgtggttctgtttccttgttccaatttgacaaaacccactgttcttgtattgtattgcccagggggagctatcactgtacttgtagagtggtgctgctttaattcataaatcacaaataaaagccaattagctctataactaaatttgttgtaattctgtctcttgatgtgggttcacagccagccacggccagtggagtctctcaggcggcgtcattctcactccgaccctcctgccttcctctttcacttacaagggcccttctgaatacactgagctcgcccagattatccagaataacctcccatctcaagatccttaactttacttatttgcaaagtatttttgccaaataatgtaacatgcacatgttccagggattaggatgtggacatttttaggaggtcattattctgcctaacacaagtaactttcataaacatcacccacaacaaaaatttgctttgccttccttctgtgtctcacctttctgcctgaatcacaggccagagcacaaacttcaaggtgaaacacaccagctctgctgtgaactgcctggatgatcctggaccactcacttcacctcccacagtctcttctcatttgcagcacaaggatgacacttactgcatcagaaaatgacagtgcaagagtaaattaagatactaaacacagagcgtggtacctgatgagccctcggtaaacattcctttcagtctcttcctttcaacatcctgtttctttcaccctcacccatctgccctttcatcttctttctcttcagcaacttacacagtctaccctaccagttagcaaagaagccagctacccattctctcttgattctgctggaatgttcttgtgatagagcctgctatctactcaagaaagcccacattatttatatggagaggtctgtttagaacaagaggtcctttttatgttcgcataaaatgtgtacatatggccgggtgcaatggctcacgcctgtaatcccagcactctgagaggccgaggcgggcagatcacctgaggtcaggaggtcgagaacagcctggtcaacatagtaaaaccccgtctccactaaaaatacaaaaattagctgggcgtagtggtgggtgcctgtaatcccagctactcgggaggctgagacaggagaattgcttgagcccaggaggcagaggttgcagtgagccaagatcacgccactgcactcaagcctgggcaacaaagagtgaaattctgtctcaaaaaaaaaaaaaaatttatacctatgtccccttaacttacacatacccatcccaattctgccctgttaatttatatgtgcacttccttattcattcttctttagtctttctctttataccttataatctaggatagcacagagacaaaactaatgacccaggccacaagaggggattttttttttagcaagacgaatgctttccattaaaaaaaatcaatgctttttttttggcaaaaggaatgctaatttgcaaggcacccctgaagcctgtttttaggcttggcttttggaaaaaccatttgagcctacaacacactcttagacgctccccaaacaggagacgataattaccacagaagccacattcactccacgtattcctgctgttggataaatgtattttcacagaatgttgagcatgagttactcctccccagtccttccactcctggaagttaaacttccttcttaaccatcttcatctccaggtggactgccaggactctggctggaaaataccgcccacgctggatggccagggtggcacctttgcctattcccataattataatagctcacactaatgcagcactcactatgcaccaggcactatcctaagagctttccagctagctacagtcctcacaaaacatcctgagtgccaccatccccatttttacagatttttaaaactgaggcagagaagtgaagtagtgtaaccattgtcacccaacccataatttaacctcattcccctccccctctgggcagaggacaccctaagatttccaaggtctcttgaatgacatccaccttccagaatgatttttgccccctctactctcaggatttgacaaacagccagcattttgttttctgtctcactcttcacttatgcacctgttccctaacaccacactcacaactgcacagcctggaataaaagctggcttttatggacctcaatctctttggaaaaaaaacagggccaggttcccagtcatatacaaagtcatttttactcaattgtcaactacttgcacagccattccctggccacaattgaggtatgctagggacagaaagtgtaatgagaaggaagtaggaggagggtgacttcctggaatggtcccaaagaggagaagatttcaaatccagaagcagtcataaaacacacccagagtatggcctttgaataatgacagccccacctgtctctttccatgcctcgtggcctctatcttccttctcagcctgcccttcctgcccttgctttcttagatcaatactaaccacctgggagctggggccagaccagagcacatagcactgagtcgtcagggtggaggagctgaaaagagagaagagtgtttaacttatgggcgtctgactcacctaggtacacatcacctgggcagaaagtggattcatgatgacctgtgcgagacttatggtaattcatcaaaatgagtgactgaggcaagtgtctgaatcaatcgagatttattaagccagagcttgagggcacgccctgggaaaacatgaggcctagaaaacctctgtggcttgcattctctctgaagtggttttcaagagaccaggttttctgtctttttttttttttttttttgagatggagtctcactctgtctcttaggctggagtgcagtggcatgatctcggctcactgcaagctccaactcccaggttcaagcaattctcctgcctcagcctcccaactagctgggattaaaggcatgtgccacaacacctggctaatttttgtatttttagtagagacagggtttcaccatgttgctcaggctggtctcgaactcctcatctcaagtgatccatccaccttggcctcccaaagtgctgggattacaagcatgagccactgcacccagccgaggccaagtgtttatacgtttccttaaagcggggaaggcagataggaagaggtggggtaggcagaagaatgattaatcttgcctttgttctgtacctggaaagataagcattatcagtctgaaatataacaggctttattcttaagaactagatttagattgcagacctaaagttacaatcgacatgttcttgttttatgggagaatatacatcttaaaaggtgtataaaaaataaaaagggtttgagagcagcaaagaacaatttgtgagggcagttatccagagatgcctgaggccttttcaccttcccatggaggtctgactaatgtacaatgccttgacacaaggtcgtgtagtaatagctattcattttaggaaatgattatggtgttacatgactcagtctccaggttgaacttccctttggcataaagagtttgggagttctgagatttttttttccctttacatttaccccctttttttttttttttttttttttttgagacagtcttgctctgtcacccaggcagctgagctggagtgcagtggcacaatctcagctcactgcaaactccacttccaaggctcaagcaatcctcccacctcagcctcccaagtagctgggactacaggcacatgccaacacacctggctacattttttttttttgtattttttctggagacaaggcttcaccctgttgcccaagctggtcttgaactcctgagctcaagtagtcaacccgccttggcatcccaaagttcgaggattacaggcatgagccactgcacctgaccagcacctattcttcaaaatctttcacagaaagcgttgtagaaaacatgagtttttggctgtatgtttcgtctgatcctacatcactaggaaggttcattcttaggacattgtgttccatggagaagggcatgaagttcattagaaaaagaccaaagtcaagttacgggaacaaagggaaagtaatcctggaaccctattcaagctacacagctgcctcttcaactaaagcaattctttaggcaatcatcactctaaccctttcagttatatgttggctcacttgtaatatgtggtaatatgtggagcagactataggctagtttttgtgttttttttgttttgtttttttttttagagtctctgaagcatcttcaaattccagtggcaggttcctctggattgtagtctgaatcaggtgtacaactgagccttttcagtagtccatacatcagcaggcatgaaggctgttgatctataatgctgtgtttttctcctgaagtttacttaaattgtctagcttcaggttgcagggctttaggaaaaagcactgttttaatttctaatgattccaagtcagaaaaacggaagaaaaatttgaaaatgttagctttgatatacaaaaatgtaccaaaaagtacagcagagtcactacatcaagactagtcctacacaaatcttctgtcattaaccaaaattttccagaggaaatggtgatttttattgtctgcttgaccagattgcacagagaaagagaagccaggagcctcactggaaataaattcttacccttttgctagctgatcatcttcctggattccgtcatggccaaaaacaggttatggttgtacatcaggttttagtagcaagacaggttatgggagggagaaaggaggaggctcggctaacaaagatggtcttgttatgtagatgaaacttcacaggtagcagctcccagagagagtagatggtaaatatttatttcagatctttaaggtatcaagctcagttcatttttcctggatccagacaagagaaagtctgcctgtattaatagggattctctacagatgccaattttctcatgaaagacagctttgcagggccacttctgcttgctggccctccaacagacatctcaaaataggtcagaaaatacattttgggttaaacatcttatttccttcaactgacacatgtttctagaggtttaacttggtgtcctgcagttgcgggtgttttcgccaattttgaggacggttcaccataatgtagagctcctgctggatttgaccaagttggaaggtgttttggacactacgcggggtcaagagttggtcaaatccaaaggaagaatgacaaaaatcaaaaacacaacaagtgattgcacaaattacgtactgttgaacactctaagcataaagagaggttagagccggccgggcgcagtggctcacacctgtaatcccagcactttgggaggccgaggctggcggatcacgaggtcaggagatcgagaccattctggctaacacggtgaaactccgcctctactaaaaacacaaaaaattagccaggcgtggtggtgggagcctgtagtcccagctacccgggaggctgaggcaggagaatggcgtgagcccgggaggcagaggttgcagtgagccgagatcgcgccactgcactccaacctgggccacagagtgagactccatctcaaaaaaaaaaaaaaaaaatagagaggttagagccaactagcaataaaccttaatctgcagctatcaaattctaaaacaaaatcccaacccagctccttacctgggaggggaccaagctgaaggctgctctccattggcacaggagaagaaaactcaccttccttataggaagtgagcaaaactccaagagtaaaggaattttatggcaaaacaaaactcagatctcaaacaatcaactggggagagcagtgacctcaagaaggaatagcatctgatcctcagaaagtcacaaaatcagtcaaagctaaagcttgatagttggtaccaagcgtaaacaggagaatcgctgcaggcctaaagagctaagctccactcagagggttccttcatggtcaccaaaatgttaaccaaaatgagtgactggggcaagtgactgagtccattgaggtttattaaaccaaagcttgagggcacgccctggaaaaacataagtcatagaaatgctccatagcgtttctcatctttgaagaggttttcaggaggcctgatacttatacatctgcttaaagtggagaagggagataggaagagacaagtagagggaagaataattggtctcatctagtctttcttctgtacttggaaatacaagcattatcattgtgacatctaacaggctttagttttagaagctagatttagcttatacacctattgttacaattgctttgtccttgtttttttttgagacagagtctcgctcagtcgcccaggctggagtgcagtggcacgatctcggctcactgcaagctccgtctcccaggttcacgccattctcctgcctcagcctcccaagtagctgggactacagacgcccgcgactacacccggctaatttttttagtagagacggggtttcaccatgttagccaggatggtctcgatcttctgacctcgtgatccgcccgtctcggcctcccaaagtgctaggattacaggtgtgagccaccacgcccggccgctttgtccttgttttatgggaggatatacatcttgaaaagttccaaggccagtaaagaataatttgtgaggacagtcacccagagatgtccgaggtctttttgccttcctgtgggggtctggctaatgtacaatgctttgacacaggttgtataataacagttgttcatctggggaaaagatggtggagtcacatgactcagcctccagactgaactatcactttggtgtaatgagtttgacagtcctgagatttttactttcctttacataattttaagagtcaaggggctgggtgcggtggctcatgcctgtaatccaggcactttgagaggccaaggcgggtggatcacgaggtcaggagatcgagaccatcctggctaacacgaagaaaccccgtctctactaaaaatacgaaaaattagccaggcgtggtggcgggcacctgtagtcccagatactcgacaggctgaggcaggagaatggcgtgaaccccggaggcggagctagcatgagccgagatcacgccactgcactccagtctgggcgacaaagcaagactccatctcaaaaaaaaaaaaaaaaaaaaaaaaaagagccatacttcctcgatgctgttccactgaggtcaaagggatgggtgtggaaggcatcacagctttttcctatttagaaacccattgacccttccttctccccctattgggttacattcctctgtccatagatcacatatttactgagttgttttccaggggaaaaaaaaatctcagttgaactccttaaagccccaagcattcaattcagttcaagagtgtctctcattttaatgatgaccaggcataaatattttttaaaggctctccagaaaattttgataagagcctctgcacaacccacagtagctttggggagcactgagctacaaaagtgatggggaaggaacctgctatgtgctggggacctttatatgtccaccttatctaatgccccaaatgacgctttaagtaggcactattatccccctatcccaagacatcaattaacttgtcctttatctcagaattggtcaaaggtggaaccaggattccgactcacatatttctgaatctaaaggtcatgtttcactgcagagcgattgagcctacacgaactcaaagaaagacaggatgactgcttctaacagaaataaccatacagtcttcaatgaagagtcagggtctgaaatgagccttaggacaaagaacagctcaggaggctgagaagacagtcaaaggtattgtggaaaggagtgaaagaattagaataagttcagacatgaaaacataaaatggggatcaagtctttctacacaaaccaagggagtagactggggctgtgttatggggcctttgaatggcagcctaaggaattgaaacttcattctatggatgataggagtcactggaaagctttgagaagctcagtaacatgacaaacagcatttccaggaagattactctgacagtgtaaccaaaaaccagtgtaacgaaaaccaggttagtcgcatgctgcatgtagagtcccatcaacatgagtgaggtccgatacaaaaaaaaaagtgaatttattctaaagctagcttggaggaaggggcacaaagcattctgcctttaaatgtgctgctccacctttggagcagaaagcaggcatttttttagaaggtaaaagagaaaatgagcaagaacaagcgtccccctgctactgggcaattatctaccgggcagttgagatggtgccttcctggacagaagtaagttgtaaaaatggccacgtgggcatgcttctgacatgttcccctagtgggtgtaagttctgaggtgacccaggatggaagctctgaggcaaccctctggaggtgaaagttccatggcaggtattctttggtccgctaatgaactgtcaactcttgagagattcatcacggagcacacagctagaggaacttgccctgtagggaatgtctggtgatgggggaggtggaaggttatatatgcatttctgaagggctaagggtaggaaacgggtagccagggaaatgagacaggagacagagggaggaaaaaataattaaaccacctctagaaaaatgggggtactcagttaccattttccactgccaagctttatttttatctttatgggatctgggtgccatatttgttctgagtactttttgctgaaagggcgcatagtcagtgagcattagaatgaaactgatctacctggagttggaaatatttatgagtacccggacttatagattatattggttggagcattgtggtctgaggtctagaaggtctctgggaaagcgtgccttgtatttttataaacaggttgtaatatcaggaagctccacaccagagggatatgcctatccctgcaagcagggccaatgttataagcagcttttgctcctacgatggttctgacccaaatcaggatgctaaccattggtcagcaacaatgtggggttaggagaaatgaaataattatttctgttaaaacaattaaaaaaattaagctacctctagaaaaataggggtacttggttacaatagtgttaggcaagataacttagagatgtggttctgaactctgacaacttaatagaattacctagaagcttttctctttttctaaacttttcattttgaaacaatttcacactttcaaaaatgttccaaaaatagagtccccatatacttttcactcaattttcccaaatattgttttagataaccacagtgcaatcattaaaatcaatacataggccgggcgcagtggctcacgtctgtaatcccggcattttgggaggccgaagtgggaagatcacctgaggtcgcgagttcgagaccagcctgaccaacatggagaaaccacgtttactaaaaatacaaaattagccgggtgtggcggtgcatgcctgtaatcccagctacttgggaggttgaggcagaagaatcacttgaacccagagggcagaggttgcaatgagccgagatcatgccattacactccagcctgggcaacaagagcaaaactcttgtctcaaaaaataaatttaatttaatttaaatttaaaaaataaaataaatacattaatcactgacattgtacaatgaatgaatctgcagaccttattgaaatctcctctatctccccactaatgtcctctttctagaccaggatccaatccaagatcacacactgcatctcattttttgtcctctcagtctcctttaaactggtacagttcctcagaatttcttttgccttcatgaccttaacatttttgaagagtattggagttattttgtagaatgaccctcagtttgggcttctattttttactcatgattaaacttaggttgtacacgttagacaagaacaccacagaggtgatgctgcaccttctccatccatcatattaggatgtcctaagatgtcgatatctctgatcactggagacgttaactttgagcactgggctaaaagttcctccactgtaaaatggctattttctttggaagcatttgtaagtgaccaatacttgggccacatgatgaaccaatcatctcagactctcttaggggaagacacaggccctggtaagttttaaatgccatataggtgactctaaccagcatctacagcttacaccatgaagattagaatcctggaaatcagctaggaggccattccttggacctaacatccagttccagacacaatatttggcatggacccatgatagggaaatgggaaggcaaaaaaatctcctaactgagaaatgatgggtgagtagaatgctacccaataaaaagagaaggcaggaccaggtgcggtggctcatgcctgtaatcccagcactttgggaggtcaaggcaggcaaataacttgagctcagacgttcaagaccagcctgggcaacatggtgaaaccccatctttacccaaaaaaaaaaaaaaattggccaagcatggtagtacatggctgtagtcccagttacttacttgggaggttggggtgggaggatcactcaaacccaggaggttgaggctgcagtgagccaagactgcaccactgtgctccagcctgggtgacagagaaagaccctgtctcaaaaaaaaaaaaaagaaaaaagagagagagacgcaggacaccaagtaaagtgtccagcccttctggactattttctctccagatctcagagaaacctgtattgtagtgaaagcacacaccatataatttttttttttttttaagacggagtctcgccgtgtcgcccaggctggagtgcagtggtgcgatcttggctcactgcaagctctgcctaccgggttcacaccattctcctgcctcagcctcctgagtagctgggactacaggctcccaccaccacgcctggccaattttttgtatttttagtagagacggggtttcaccgtgttagccagggtggtctcgatctcccgacctcgtgatccgcgtgcctcggcctccctaagtgctgggattacaggcgtgagccatggcgcctggcccacaccatataattttactatcacaagcctgacgtgagctcctgattgccactgacgggaagggaattatgaattatgtcatggaaatatatgaccacatatgccaagatgcacacttccgggtataactgaatgaaaaattcacaaaatccacatcagagatacatgacctcccctaaacaaccctgttctccccacttggtcttttgtccttaatttcttttgaagtaagagaataaagactgttataaatttcacaaaataggaaagtgtacacatctcctgtcacccggctgtttaagcaagaggacactgtgctcaacttcgttagagttattatcttgaggtttttataaagagatatcatcagtcccctccttagaggggccatctgataacatgcaaaaaaatgccactgtaaccaaaacccagaggcaggaaggaccctgagaagagcaatccctaaggtattcacatgcctgccatggtctggtgctgctggtacaggaggaactgctgctggcaatagctcgaaaaaaagagaaggcagggtcaagtgcagtggctcacgcctataatcccagcactttgggaggctgaggccggcagaacatctgaggtcaggagttcaagaccagcctggtcaacatggtgaaaccccatctctactaaaaatacaaaaattagccaggcgtgttggcaggtgcctgtaatcccagctacttgggaggctgaggcaggagaatcacttgaacctgggaggcggagtttgcagtgagccaagatcatgccactgcattccagcctgggcaatagagtgagatcctgtctcaaaaaaaaaaaaaaaaaaaagatagaaggcagctccaacactcagggagtagtaagaaaagaactcactcaaccttcaattctcaattctcacacagccaacacccttccagcctctctatgggggtctcactgggagggctggcacataattaaatgccaatacatggatgaaataagttacagaagggtggcatcaactgggtcaaaaacggttgaacatttcacaaaacaggaaggatttgggttagaccctgaaagactcaggcttaggaaagcagacacaaagagaaacagaagccaagggaacctaagtaaagcatccagccctcctggccaatttcctcctcagacctcagagggacctttattgtagtgaaaacacatgccatataattttactatcctaagcctgagatgagctcctaattgccactgatgggaaggaaattatgaatcatgtgatagaaatacacaacgcacgcaaagatgcacactttgcaccactctggatgcacaaagacacacacaggccccaccggagatgctagttttgaagaaggtcccaggagtaagagtgggtttgcagatgttattttatttactcttctcacacacgatatggggatatttcacaaggaggatactgatcctcagaaaggggaagtaacttgccaaggttgttggtggatgtgggattagaacctcagtgagtctaacaccggaacccatgccaccaccactaccaccgagagacctgaacagggtatgtgtagggaacaggaaggagcagggagagctgaagcagaaagaaaccattttaaaacagggaagttaggtaagcttgctaaacagggataatatgttgcagggaaatgaacactagacagacgttcaaatttgatctgattacagaaaagccactgaaggttttgagagggcagaaccagccaaagtgaaaccttgagccaagaccaaagaaggtggtgaaaaggggagtctggattcctaagctagagagaagccgccaacaacagtgacaggactacgtgatgcatggagcaagaactagtcggagaggctaaagctgtgggtttaaatacaaaaagtcatgcagtaagggcatggcagggtgaagcaagttatattctttctctgcagttcagtctctcttcatctataatcaggtgcaatgagaattaatgtctaaatgaccctcaacccttgctactcaaagtgtggcccaccaaccaaaagcaacgacatgtccaaaagctccttagaaatgcagaatctcagaccccatcagaaggatcagaatctgtatttaaacaagatctttgggggatctgtgagcacattaaagattgtgaagcagttttctgaagtgtcttccagttctaaaatgcaatgatttcacagtcatctgaactccgtcaccttacaggagaaagaaggaaaataacatttaccttcgtctcatttgtgaccttttcttaaaacagcgtcttagactcgcccacatccaggtagaggatttagaaaacacccgaaaggcagtgctgccaccttgtgaccatcatcagtaaatgcacttaactcttagcggtctcgccagtcgtggaggggatggggctggagcgggcagggtgtaggaagtgaagtccaagtcacagatgaggtaagagaaccataaccgcccacaaagactggaagtaactgtcagagagagctcagcctgcatcacagagcaacgacccattgcaaaaaacagtttttataacaatatgtgatcagtgagaaacagttccaagccaagttctgcccttgtaaccttaaaaatcattgtaatgggtatttcctttcttttcttttcttttttttttttttttctggagacggagtctcgttctgtcgcccaggctggagtgcggtggcgcgatcttggcgcgatctccactcactgcaacttccgcctcctgggtttaagcgattctcctgcctcagccacccaagtagcttggattacaggcgcattccaccatgcacggctaatttttgtaattttagtagagacagggtttcaccatgttggccaggctggtcttgaactcctgacctcaagtgatccgccggcctcagccttccaaaatgctgggattacaggcgtgagccaccgcgccaggccactgtaatgggtattttcaacatcagcctcagcctgaattccgccagtaaactggtaattccccaaggaaacttactttactgtgacagttctttcacatcctgagccaaaatgtgtgtgattcgcactcaccaatccttgtcctgtgtcctccataggctgaaataagtctaatacttctttgtacaacccaccttcaaatattgggtaaaataaaaaaaaaaacatgtgccacccatcccaaattcccttggtggtttcccacgttgggtcacgtgaagtcccacaccttccggtccctttcccacggacgagtgaagtgcagcaaccatagcagatgctccaaatcctaggggtgttccccagagcagcagagccacaggacccccgtcaccgtcctggcacctcacccctatgtagaagctgaaccccgtatcagctgatctggggacgctgacttttcctgcttctgctgctgctcagtcatcctacacctgtgcaggtgtctactttttattcagttttattttgtaagaaatatttgtcggagcctgctgtgtactgtcactggagagacaaaggtgaatcacacccggtccctgcctcacagagctccaggttatggaaggaacccactcaaagccagaccattaccattcagtgagaaacaccgtgacagacatcagcacaggtttctttgacccatctcaccaatgccttgtgaaaaatctcccactcttggttttctcaccaggttccacgcatacatgggatcatttctgagctgagatttcgtcatttcaagctcaaagtgaaaaagagaatgcaaatgtccccgatggtcctttgtgtggtcacagctgaacccgacatgtcctcctggctaatccagggtgctcagggctcccatttcactctgagcgtcctctctcctatcggagctcacatgtctgcacctgcagcagccaggtggctgcacactaacagaaaatccacaaagtcaggaaacttgatttattcccgtaactttgaggctagtgactttgtgacattgaactaatcttataacttccctgcactttaatttccatgtctgtaaagtggggcaggtggattcggtcaccctaggtgccactgtatagtgagaacttctcagagacagcagcacacctgatctcagcatccaccatctagcgaataccaggcacacactaggggctcaaagtctcactgaatgtatgtgtgaataaatgactatatgagagccatgtggatcatggacaaagtcaacaaatatttttgaacgtctaccaaatacactgtagaatagggaaataagtaacccaggcagggtggtgttttctcctaacttcccctgacctccttcctgggggagggagggcctctgtgcatcagacagactcttgacacagataatgttctcgagatgcattgtaagaagttatcatgttaacaagaggaaagtccatttgtcttgggggtgttttaatcaatggacctgagggacctgaagaccccccgatgagacacaggatgcgacacccaccccaagtgcatggaggggaaaccagatggagtgaactgacaggtagcgggacctgggagaacagagggataaagagactgaggcacctggaggaaggtctgaggaggagctcccggcccctgcggtggcctcggtgtggactgatgcagaactcagcagcataagtaagtaaagtggccgcaccaggctctatgcatacatgggaccatttttcagtaagattttctttctgctaatgggcttcacttttgcccactttctaacacatcaggacaagttaataggttacaaaccatcattccattcagcagtcatttatagaatactcccaaagtgccaggccctgtgtgagttcaggcaatacaaaaatgaacataaaagctcctgtcctctaagatccccatccaatgagctccagggagcacctctcctacaacacgcccctgctctgcacggccctcctctctgccctccaccaacccaaatcctcctccacctccagctcaagttccacccaaccaagtccctctcagtccccctccactcctgccactttgagagatgactgcactcatatctctaggttttatgaagtggatgtcatctccctggttagacttgagcttcctgaaggcagagaccatttttagaattttccagaaaaaaagccacatcagtaatttgcatcagaacaagcttagactctgctcaagccttcaacttagacagagactccactgcctagcacagtccctggtccctgcagtgctttataaaccctgcagtagcaaagtccacaatcaactcgtgtgtcagtcaacaggctgggataagttgaaaatgcagacagagaagaacagtcaaacaaaaatcaaagggctttgactcatgccttgcctcttcccttttctcagggaaacaaagtcacaccccctgctctcactcctgcctggaggcttccagggagggctcccttgttggccttcccttcagcccccatgaatatcacccagcattcaagcccagcctctcctctccctttgagcacattgcctaaagtctcaaataaatgtcaagtttagtgagtgctgatattctatgcccctaatgtttacttcaagtattattacctttcttcttttgcccggggccatttccaaacaagggctggagccaggcgccccagcagctgggcaaacacacttcagggctccttccctcctgtggctcctgtttctcaaaccctctgggacctgcagctctggggggtctcttcccccaacccagttccctcccctttagaccagaacaactaagccagacaatggaaaggaattgcgaacagagccggaacaaggcaactttccaggcaacaacgctactattgccaatattttgccaaggatgggagcaggagcacagaggggaagcagaccttttcaacatctcttctaccaatacatagcatccactttcctgccaaatactcagctagaaagggtcattgaaaggtataaggtgggactgggcgcagtggctcatgcctgtacccagcactttgggaggccgaggtgggcggatcacgaggtcaggagttcaagagcagcctggccaatgtggtgaaactccgtgtctactaaaaatacaaaaattagccaggtgtgggggcgtgtgcctgtaatctcagctactcgggaggctgaggcaggagaattgcttgaacccaggaggcggaggttgcagtgagctgagatggcaccatggcactccagcttaggcaacagagcaagactctgtcttgaaaaaaaaaagagaaagaaagaaagagagagagagaaagaaagaaggaaggaaggaagaaaggaaggaaggaaggaaggaaggaaggaaaagaaaaagaaagaaagaagaaagaaagaaagaaagaaagaaagaaagaaaagaaagaaagaaagaaagaaagaaagaaagaaagaaagaaagaaagaaagaaagaaaggtataagtctaatccgttacctaacagcaagacagcatcagttcactgcttttgccctcacatgaaaacagtgttgtgggactaaagcacagactggcaggtcatgtacactggcctcagccatccccagagatcaggagcctccgactgggaaccttccatacaatctccaagcgacgtacagctgcaccaacagtcacaattaaagttctaatctcagccaggtgtggtggttcacgcctgtaatcccagcactttgggaggctgaggtgggcagattatgaggtcaggagttcgacaccagcctgaccaaagtggtgaaatcccatctctactaaaaatacaaacattagccgggcgtggtggcgtgcacctgtaatcccagctactcaggaggctgaggcaggagaatcacttgaacccaggaggcggaggttgcagtgagccgagatcacgccactgcgctccagcctgggtgacagagtgagtctccatctcaaaaaaataaaataaaataaaaatagataaataaattctaatctcttccctccttctgttgctgccactaacgctgatgtccatggtctctagcagcctgaatccaggtaaataagactgtctgtgaagggaaaactggggggagaaaatgtggcaaaacaggccacacgtgcatcaaaatgtagccctttcagccacagaaattgggagcaagtgagcctttctcagtgccagtttcctcatttactaaaagaagcaaactgtacttacttccatggtcgcgagggttaaatgagatattgtatgtgacagtgtctgcaactacagccggcaaatatatatatatatacacactggttcaagaaagatttgcttccttgccttctcccccaagattttcccagaaaagtaatgcacttccccagggccaaacttggtggcagttgtgggaggatgttaaaggcaactgcacgttcattaaagttaaggaaatttttgctttcattccctttttgtaaagacaggatctcagtctatcacccacgcaggggtacagtggtgccatcatagctcactgcagcctcaaactcctgagctcaagcagtcttcctgccttggtctcgcaaatatatataaatagaagtgtaccccacatgcctggctaattttttttttctgtagagacggggtctcactgtgttgctcaggcagatctcaaactttgcttgtattctttttttttttttttttttgagacggagtctcactctgtctcccaggctggagtacagtggtgcaatcttggctcactacaacctccgcctcccgggttcaagcgattctcctgcctcagcctcctgagtagctgggattacaggtgcacaccaccatgcccagctaatttttgtatttttagtagagacggggtttcgccatgttggtcaggctggtctcgaactcctgactttgtgatccacctgcctcggcctcccagctgggattacaggcgtgagccaccgcacctggcccacttgtattctttagagtgtaccaagtatgcacacattttaatgctatttaatggtaatgtaataaactgaagaaaatcctatcaccagatagtgtccaactttgaagctttagtcacaccaagccctgctgcaacaacgcaccctttgggaagcagacctttggttaaaggttttgagtttactccagttttcactacaagcaaagtggcccagacctttgcaaagaaaccacctagaagagagctcaccccaccaggtgcagtggctcacacctgtaatcccagcactttgggaggccaaggcgggcagatgatttgaggtcagcaactcaggactagctgattaacatggtgaaaccacgtctctactaaaaatacaaaaaaattagccgagcatggtggcatatgcctgtagtcccagctacatgggaggctgagtcaggagaacagcttgaacccatgaggcagaggttgcagtgagccaagatcgcgcgccactgcacttcagcctgggcaacagagcaagactccatctcagagagagagagaaagagagagagctcaccccatgtatatttccacttgggagcatcatctttccaagggccactttgaggtgaaatggcttttttacatactcagcatcaatttggtcctaaaatcaggagacattcacccttctccaccccaatttccaacatcccctcctttgtagagagagcactctggaagccactgagccccatagccctagggcctagaccactattccaaaagggaagacttttccattactatgacagacacccaggctggagtcctctgcctgcactcaaagctctaaccccaacctctttttccagtgcaaacccttctactcactaaaaatttctctccactcaaactagcctgtttgcccttccctgaacggggcttgtgttttcccatcagctcaactttgctcacatgcccagctcaaaaccacatttccacaggccagacaagtgctcagttcttcccacacgtagatgagtgctctgcctcctgagagcctgcttagccctactggacactgtcttgttgcacttatcatctgctgccttatattgaaggccttcatatgcctctcctgcctccaccccctgcccttctaaatttcaaactccttggccgcacagactggtgcactgtttccatatccctcacgctatccagctcagcacttggcaaacattagctcaccacaagaatgcatcctcaggtttttaagtcagacaagggcttcatagcagttctattgacattggggatgaacagttccttgcggtgggggctgttctgtgcattgtgagacgctcagcagcatccacgtggcctctttccactagatgccaatagcagccttccctctctcccgtccccaccccggtatgaaaaccaaaaatgtctccaaacattgccaaatgtcccctgggcggaaaccaccctcagtccacaaccactactctataccaatagttctccacctggccacacattcagactcacctgaacatttacactcagcctggaagtcagggggacctagatccaaatcctagctctgtcactccctttgcaaccctgacaagtcgcttcacttttttttaccctgttttatcgtcttaagatgaataaatatcccttctcacaatcttgttgtgaagattaaatgatccgcagcgtgacctagaaagggtttaataaatggactgtgtagaatttctaagtcgctcctaaagcacgagggtgaggaactgcggaaagttctctgcgccgccaggaggcgccatcataaaccacgtcggtgggtggccgccaggctccagctttgtttcccagccaagcaaactttgcaatgtgggcctgagtctgagctacttcgtagctggaggaaatgacactcctcctcatcccccaaaataattctcaaaataaaatcgaatcttattttatcttttcatgacatacatgctcaatatgcttttcacaggggagagggaaaaaagaaatggatgagaatatatgaggatattatgaaagaaatcatattttatatgatttataatagatgactcattacttataatattacttgttaatcataaaattacttataataatagctgacatgttttaagaactcctgtgtctcaggcattgttctaagcacttcacatttatctcattttatcctcacagaaatcttatgcattttacatttttttacttttcatttttcagactttcaaaaatattgtaaaaatagtcagagttccagtatatccttcatccagctttttcaaataaccttaactctaaagcaattatcaaaatcagtcacctagcattgatacaaaaaattttaaaatatagaaatatggggccgggcacggtggctcacgcctttaatcccagtactttgggaggccaaggagggtagatcacgaggtgaggagatcgagaccatcctggctaacacgatgaaaccccgtctctactaaaaatacaaaaattagccaggcgtggtggcaggtacctgtaatcccagctactcgggaggctgaagcaggagaatctcttgaactcaggaggtgggggttgcagtgagcccagatcgagccactgcactccagccttggcgacagagtgagactctgtctccaaaaaaaaaaaaaagaaatattaaaattttgctaatcatcccagtcatgtcttttttctgctccagagtccaacccaggatcccacactgaataacactgtcacatttcctaggcctcctccaacctgggggagtttcccactctttccctctctcaggaccttgatgcttttgaggaggtctggtcagttgttttgtagaatgcccctcaatttgggtttgtctcatgtttccttgggatgtttcaggttatgcattttgggcaagattagcacagaagcgatgtgtctttctcaggacatcccagccggagccccaggatgtctatatctctcattaccgatgaggttcactttaagcgcttggttcaggtggtgtctgccaggtttctctactgtgaagttactattcatctcattgtaattaataagtatcttgtggacaggtactttggaaatatgcaaatagccagtttgttcttagcatacttttaccaattaatttctagaatccagagataattgtagccgataaacaattcttactgtggtgttagccagtgattttctgcttccatcattgcttctacactgattaactggaacgctgctgtaagaaagagctagttcttctttctcatttatttatgtattcacttatttatatatatatcagcatggactctcaagtatttatcggttggactacattactattattattgattatgttgctatattgtccccaaattggccattgggagcttcttctagttggcatttgtgatactttccacacatccccatcatttttcaagttgtgccttactctcaggccccgcaagatgctccagtctcctcttgtggtttcctgccccagccctggaatcagccatttctccagggaaccctggttcctttcatgggagaatgatgtttacagaccatgggcgcccatatgcccattgctagtaggtgccggtgcttctatgccctctagtggtcagagctgggaaataacacacccacactagtgtactgttacccacatttcacaaattaggtaaatgaggcacagaaaagttaggcaacttgaccaacatcacagagaaaataggtagtggaactgggaaatgaaaataatgacagatgcaccacaagttctaacaagcaaaagtagctttttcacacatccacatcagcagaaagccacaagcccaatattccggcgtagacactctttgaaaaccagaattccacagcaataaccacgatgacaaccaccatgtactcaacacccgcctgggcacggggctcccacagcagctcacttattcccaacaactctgcaaggaggattttaccatcctccttttacaaatcagggaatcaaggatcatagaagccacgtgacttgtccaagtcaacatagttaagtgacagaaccattagctgtccccaggtacatctggacataaagttcatgtttatgccactgtgtcagcatttccaaaaactgattttaggcgaaacgtaagtaagctttttaaaaactttaatacttatgcgtttattttaatatacattgagaaaacatttaagcacacatcaaatctgtaatttcatggacaatattgcataagacaaggatgttttgtctccaactcctggcctcaagccatcctcccaccatagcctctcgagtagctgggatcacagatctgagccaccgatccctgctaggacaggatgttttgtaaactaaatttatttagaaaaaaggatgaaatatataataataaaggtggtacaagctagagagaaaatcataaagtcagcctagaaatgtctggtgtctggatgacataaagctacagcactgtgaagcctcattctcagttactcccaggaaattagagtcacataatgctgcagaaagaacagctcagaatcttagatccgggctttagccctagatatatccatttgtaggaccccagacatctctgtgacctccttgctgggagtaaatccaaccttcccagacatgtgagaacagtaagaagaccctgcacacacaaaggagtttctccgtcacagagaaaataacaccaggttcagggaccccagggactctgcatggtgctgacagacccaaggccaaggcagagcagaggtccacgctggggagggagggtcatcctgttatgaaacagggatccaagtaagccttgcttctcagagcctggtctggggaactcaaatgtagacagaagggagaaaggaagaagagaaaatgaggcaaaactgagaggggaggggacagagaggtgacctgggcagagcttcacccatgaccctggaaagtgctcctgccctgggaggaggctcagcatggaaagaggaaggacagcagagcctaagtcacagtagccctgactacagcattcctggagcccaggctcttttccacagaggaggaaagagcaggcagcagagaccatggggcccccctcagcctctccccacagagaatgcatcccctggcaggggcttctgctcacaggtgagtggaggattcctgggagtgggcaagaggagggatcacagagaatggctggggtctcctggggaggatggggctctgataggggacagaaggcttctgctgaagcctcaggggagagaacatcagagagggacacgggtcacaacaagacaatcacattgaactgggattgataagagggaggaaaatccattgatcatgttttccaagttaatcattactggccactacaattagaaaatgataagaataagaattacatcagggtgatactttaaataaaaatataaccagggcactaaaacctgtctttgaccaccaaccacaagttgcaaaataaccaccactccttaactcatccaccagtatttgcaatcaaattttaggcactggcgtacaacaaatatcagacaagtctctgtgttcaaagagcttacactcttgcagagatgaagatagacacccaaagagatctagaatgtgagttcaggtgttgacaagagccctggagggaacagagcagaaaaaggtcagaaagggaagacccagggtctctagaggaggtgtcaggggagggatctcccaaggatgccctgatgtgagcaggatctgagggcagtggggagggagccatgcagacccctggggaaggggattccacacaggaaaatgccaaggttagaggtgctgaagaaagaaaggtcacgttactgaccttgaccaagtgggacacacatacactctccaaggctgaagggtgaagagactctctcaggacccagggccccatctttccatcccaatacatgggtcccaatattgactgatgctttctccctcctagcctcacttctaaacttctggaacccgcccaccactgccaagctcactattgaatccatgccgctcagtgtcgcagaggggaaggaggtgcttctacttgtccacaatctgccccagcatctttttggctacagctggtacaaaggggaaagagtggatggcaacagtctaattgtaggatatgtaataggaactcaacaagctaccccaggggccgcatacagcggtcgagagacaatatacaccaatgcatccctgctgatccagaatgtcacccagaatgacataggattctacaccctacaagtcataaagtcagatcttgtgaatgaagaagcaactggacagttccatgtataccgtgagtatttccacatgacctctgggtgttgggggtcagttctacttcccacatatgggattgtcaggcctgggctgtgcctgtggccctctctgcattacattctgtatcagggtttggacatttagtgcaggacacacacgggggagacaaacttccacagatcagaattcctttcctgcatccagaccctgcagacactcgctgcagaggaaggacagtctgatggggggactcagcagggcaaggtcagtgtcagaaaagaaccccatggtctccccatggacctgaccctaagaaagaccctggagaactggatcagggcctggcctgaggggtccccctaggattctcagagagaagctcaactcttcccagaactgagcccctgtgcaaatccctgtcccagattcctgactccaggtgaccctggggaccctagggatcctgtgccagggctgagtgaggcctcctgggcagggctgactgggagcaagaatttaccagctgtctgagggtcgtggctcctggagttggtcaccagccagggtccagccccaagaacctctcctgggcaaggacagggcctcatcctttacctgagactcagcatggagtgaacagatggacaagattactagggcatgagcccactgcccaggggaacttagatgactccatgggaagttcagtatccccagggggaggaaaaagaagagagaagatgctcccagcagctccttttccacaagggatcagactcagggacctctcttttggaggcaaataagcatagatgctgttcctttgggcagctcctctatacacagctgaggtcaagtaattgtaaatattttgagattaattcacaaacaacgtcacagccaaatagcacttatcctacttattgaaaaaaaaaattgaggaacagggagacagtcaccgactagggtcacacaagtcaaaggtgtcagattagagtcacacgaggtctctctgcagccacagctgcctcttctccaccaggggacggctggcgttattattagacatctgcaggcctgagaccagtcctaagttctctttcctttttcttgggcatccacatctcagagggggagattttggtctggagagtaaggggcaaatggaaaattaatcaatttttcctgatatagtttggatgtttatcctctccaaatctcatgttgaaatgtgatccccaacattggaggtgaggcctggtgggaggcgattggatcatggggggctgtttctcatgagtggctcagcaccatccccttggtgacaagtcagttctcactttgagtgcacaggagatctggttctttaaaagtgtgtggcgcctccacactctctcttgctcctgcttttgccacatgacaccacctgctcccccttctccttccaccatgattgtaagcttgctgggtctcaccagaagccgagcagacgctggtgccatgcctgtatagcctgcagatccctgcatcaattaaatctcttttctttataaattacccagcctcagacatttccttatagtaacaaaaaatagcctaacacattagcctaacctagaactaaatcccttgtgtcaacagagtcagtgccaggaatgtccgggcctccctctcagatgcgcaccactgccctcactcgacctgaaatcctgtgtttcctgatgtgtcagtgacactcccacaggaggataaaacactccccactcacaccctgcaccagcgcagggcccagtgagagacacacactcagtagttctctgacgaaggagggaaggaatgaatgatgaataattcttaaactcttcagagaccggatcttggatgcagaatcctataaggttctggccacacctgtttcctgtccctccaggggccgggatccttgttgcattcctctaacccctgcccctaaagctaccccaagaaccgcatctcatgggactctggcacagctcacctgtgggaaggttttcaggtctccctggtcctggtttgtgggcggcaggtcacccaggcgccgaggcaagagaccaaggacacgagctgttccagtataataaaatataaaacaagaaaagttataccagatatagatcttagatatgattatatgtgaatatcattaatcattagttggtagcaattactctttattccagtattataataatcctcgctctataatcacaacctaggaaaagccaggccatacagagataggagctggggagacatagtgagaagtgaccagaagacaagagtgcgagccttctgttatgcccagacagggccaccagaagggctccttggtctagcggtgacactagcgcctgggaagacgcccgttgccaggcagaccgaggtctagcggtagcgtaagtgtcaagggaaaacacccgctacttggcagaccgggaaagggagtctccctttccccgggagagtttagagaagactttgctcctccacctcttgtggagggccagacaccagtcaggtccactcgcagttatccggaggcctaaccgtctccctatgatgctgtgcttcagtggtcacgctcctagtccgccttcacgttccatcctgtacgcctggctctgccttctagatagcagtagtaaattagtgaaagtactaaaagtctctgatatgcagaaataatggcataagctgtctttctctttgtctcctctctctctctgcctcatctgccaggcagggaagggccccctgtccagtggacacatgacccacgtgaccttacctatcattggagatgactcacactctttaccctcccccttttgctttgtatccaataaataacagcgcagtcagacattcggggccactaccagtctccgcgcattggtggtagtgatccccccggggcccagctgtctgttcttttatctctttatcttgtgtcttcatttctacactctctcgtctccgcacatggggagagacccaccgaccctgtggggctggtccctacactggttctagaataaccaggggtctcctggtccctagggtctctgaggtcactgtagtccccacagctcactgtgatgtaatctctggctatctctgctaccccttgtcccttatcttcctcccctttcacaccagtgaggatgcccctgccctgcacagcttcctccacccttaggtcttccccaggaactccctctaacaagactggctgttctgttcccttcccactcacactgtggcctggcccacctccggggcaataaaaaaaggcacagaaatcagctggatcagagcccctgccaggcttcatcatgagccagtgtccccaggccaccaggagaacgagcttccactgtgtccccacccagggctctttcccttcttgaggccaacatgtggaaaaggccacaggacagggacgagcgactcctccacctactcttgtaatttcccagcaggtttttcctgccactgcacagacaaaaccaattcactgagaccacgatattgcagtcaagaaagagtttaattaatgctaagtaagccaaacagtaagacaagagtttattattacttaaatcagcctccctggaggcttgagattagagtttttcatggatagtttgatggcaggggactagggaatggggaaagctgattggttggggataaaatcatagggatgtggcaactgatcctggtgtgctgaaactgcctctgagtgggggccacaagaccactgaatcatgggtcacagtccaggtggagtcagtcagttgccagaatgcagaagtctgagaaacatctcaaaagaccaatctcaggttctacaatagtgatattatctatgggagcaattagggaagtcacaaatcttgtgaccctcccataatgctgatctcgtaatgtttcattagtttacaaaggcaatccctgacaaagaggaagttagttttagggagggactataatcatccttgcttcaaagttaaactatacactgaatttttcccatggttagcctggcttgtgcccaggaatgagcaaggacagccaccttgaggctagaagccagatgaagtcagccatgctagcttactctcgccatcttaatccttgcaaaagtggtttcactctctacaatgactcaccaggggtcagaggcaagaggagaggtctgcagtccccaaagctcatggctcatttcacccatttccctcccgactccaccctcattcagctatggggctcccatcctccagtcattccctagagacttctggtgtccaatttggcatgtaagaagcttgaaatctgtcactcagttataacaagtataaaactgaacaaactgaaaaatcaacaactcttttagatccctcagagaagctaggcctcggtgttaattgccccgcatattggagagaccgacaggcaaagatggagcagcacacctcacctgggcagaagcccagggacagaaaccctgcagaaccagcgctggggtcagaaatctgaactgtaactgacaaattgctggaggctcagcatggacatgccccagagttaaactaaacactccaggggagggatcaatcttggggctgggacaaggagggactcttttgtgagtcttaactcctagagctaccagattctcatagtgaataggcaacaaagatcccctcctccttcctgaagcgggagggggaaaggaattatttggaaagatctccgtgaattctattcttcttagcaacagctgcctttaagagaaacttttaccagagcctgacctgctggggttttatgggagcctaactggcctggcagtgggtaaatgtccaactccagccccctgtagccatcatgtcccacctaagggggcaaaaatacagagagtcacttatgaagttcacagcccaggctgcagacctcatccaggaccacagaacccttccctcccaacactcaccacagcgtcactgaacacctgctcacccaagttccttttacccagaatatcatgtctggctttcaacaaaactgcacaagacagactaaggcaaaaacaaaaaaaaatgcaatttgaaactcagaacaacaatcagaaccagactcagatgtggcagggatgttgaaattagcagaacgggaatttaaaacaactctggttaatacagtaaaggttatgatggaaaaagtagaccccatgcaggaacagatgggtgatgtaagcagagagatcgatattctaagacagaaccaaaagaaatgctagagataaaaaaagaaaccctcctgtaaggtaaatgaagaatgccctcaatgggcttactggtagcctggacacagctgaggaaagaatctctagcttgagggtgtgtcagtagaaacttccaaaactgaacagcaaagttttgtgtgtgtatgtgtgtgtgtgtgtgtgtgtgtgtgtgtgtgttgttttgtttgttttttttttttttgagacagagtctcgctctgtaccccaggctggagtgaagtgatgctatctcagctcactgcaagctctgcctcctgggttcacgccattctcctgcctcagcctcccaaatagctgggaccacaggcgcccgccaccatgcccggctaattttttgtatttttagtagagacggagtttcaccgtgttatccaggatggtctcgacctcccaacctcatgatctgcccgccttggcctccaaaagtgctgggattacaggcatgagccaccatgcccggcctgaaacagcaaagctttaaaagagtgggaaaaggccgggcgtggttgttcatgcttgtaatccctgcactttgggaggctgaggcgggtggatcacctgaggtcaggagttcgagaccagcctggccaacatgatgataccctgtctctactaaaaatacaaaaaattagccaggcatgatgacagatgcctataatcccagctactcaggaggctgaggcaagagaattgcttgaacctgggaggtagagattgtagtgagccaagatagcgcgatttcactccagcctgggcaacaagagcaaaactctgcctcaaaaaaaaaaaaagagtgggtaaaaaaagtggaaaagcagattcaacttcacattcaagattttgtattgacaatggcatattttatattttctaaaagctgtaacatacatgtaatgggaatactggtggttcctgggaccaggtggagctggccagccctgtgctgtctgatgggcccactgcttgttccacacacatgtgtccctcatgatgatgccattatcataagatggggtcttcgggtggggagatgcaccagccaccggcatctcacttagactctgcccaattcgggctaatttaatcaaattctagttgtgtttcctgaggcgtaaagaaaaggaggaaggtgtttcatatgcctgtttaggccccttcctattttgcctaactctgcacaggaaattgaggtgagggctcttttgacatttactgacatacacacatcacatctcctaatttggtatttttcttttctgtgtattattgagacatctcagactttccctctgaccagttctgtcttcctaacaggactcacaattctctctctacccagagagtcactgatttcaaaccaaagtcagcatctttctttgagcttaacatgattatgctggtcttcagcatttagcagacctaaaccttattatgttatcaagagaaatgctacagcaaccaattgacctcagacctttcgaccattaataataatttccactgatagaaaaaaaattaatttcccccaaatttcttttttttttttcactatagtgagatcataactcctttgtctaaactcctgacaaatttttaagggcaaaatggactattacagatggagaatcccaaatccaaaaatccaaaatacaaaatgtgccaatatccaaaattttttgaccactggcatgatgttcaaaggaaatgctcactggagcattttgaaattttagattttcagatttgggatgctaaaccgatacttgtaatacaaatattccaaaataaaaaataattagaaatccaaaacacttttgctcttatgcataagagatactcaaactctattaattatagacaccaagctgtacagcagatctctagaacctccatattttgcataattgaaactgcacacccaaggaacaactccctgccagcccttggaaatcaccactctgctcttttattcttttttcttcttttttttttttttttttttttttagatagagttttactcttgtcacccaggctggagtgcaatggtgtgatcttggctcactgcaacctccgcctcccaggttcaagcaattctccctagccttcttaagtagctgggattacaggcatgtgccaccacacctggctaatttttgtatttttagtagagacggggtttcaccatgttggccaggctggtctggaactcccgacctcaggtgatccgcccgcctcagcatcccaaaaggctgggattacaggcatgagccaccgcacccggtctgcattctactctctgattccatgagtttgactactctagggacctcgtattcgtggaaccgtacagtagttgtccttgtacgactgacttctttcacttaacataatctccaatgggagaaaatatttgcaaagattcttcccaaatgtctctctcatatccatcaaacacagagtccatgaggaccagattgccagcagcttcatgctccctctttccaccagtcagttctgcatttgcaaacgttcatatgtatttcttattaagttccacggagtcctcacctgccctctgcaggaggagaaaacacattaaggactgaggacagagaacatggttctgctccaaagccaccagctcctgcatgtccccgccctctttctaagttgggattctactcttcctgttgttgttgtttgttgttgttgttgttgttgttgtttgttgtttgttgttgttacggagtcttgctctgtcactcaggctggagtgcagtcgtgtaatctcggctcactacaacctctgcctcccaggttcaagtgattctccttcctcagcctcccgagtagctggaattacaggcatgctccaccacacccagctaatttttgtatttttagtagagactgggtttttcgccatgttggtcaggctggtctcgaactcctgacctcaggtgatctgcccacctcggcctccccaagtgctgggattacaggtgtgagccaccgcacccggccttctactataccttttactgactcactgtctcatgtcagtcaccatgatatacctggaaagaataacctcaccttgtaattctgagacctcagcaccagcatgttccaggtgaggaccccaaggtcagccaggcagtcagccatcagggaaggaacaggagaggtgccaggggatgtgactcctggtcctgtgtctgtccaacacccaatgctgctgcttaattcacagttgagaaagtctcttcttctttcacaggcaggcagcctcacagtctctgagccctcagacggtcatgcatctgtctgtgacacacacatctgtcttcgtctttttttgtttgtgtgtttgtttgtttgtttgcttgtttgttttgagagacagagtctcactctgtcgcccaggctggagtgcagtggtgcgatctcggctcactgcaagctctgcctcccgggttcacaccattctcctgcctcagcctcccaagtagctgggactacaggcgcctgccaccatgcctggctaattttttgtattttttagtagagacggggtttcaccgtgttagccaggatggtctcgatctcgtgacctcgtgatacgcccgcctcggcctcccaaagtgctgggattacaggcgtgagccaccgcacccggccttgtcttggtcttttaaggagtggagttggccaaagaataggagatgttgattctgattaaaatatgcctgtggaggaatcacaggtgccacacagggcaatcttctctctgttttctgcacagcggagctgcccaagccctccatctccagcaacaactccaaccccaaggaggacaaggatgctgtggccttcacctgtgaacctgagattcacagcacaacctgcctgtagtgggtaaatggtcagagcctcccggtcagttccaggctgcagctgtccaatgacaagaggaccctcactctactcagtgtcacaaggaatgacacaggaccctatgagtgtgaaataccgaacccagtgggtgccagctacagtgacccagtcacgctgaatgtcctctgtatcttctgttcctctgtggcccaggcttccagcccaaatccacacagccagaggccaggcctctcagtccctctcaagtccagggactcagactctcacccaggctggccatcacttcctgtcccaagcaaacctgggcagacccagccttgaccaagaataggaggggagaggctgctcctgtcctgggaggctcagggtccacagcctgtgatgggagaaacaggtgaatatctcagacccagactcagtggacagattgggtttcgttaggacttcaaggttgtgacttggctcacagggacactgtggctcttccacagaccaggagcttccccttccctttgatgatatcatctatgactttattctcgctactccagatggaccgggcattcccaccatttcccccccagactcctattaccatccaggggcaaatctcaacctctcctgccacatggcctctaacccacctgcacagtactcctggtttgtcagtggaatgctccagcaacacacacaaaagctctttatccccaacatcgcagtggataagagtggatcctatgcttgcctcgcccataactcagccactggcctcagtacaatcacagtcaagacaatcacagtctctgctaagtggatccctggagcataggccctgagccctgggtaaagccactcagttttctgaaagagcctagaagtttatttcccagcccatgtcttggacacaagcaaatcccaaactctaccctgagccctctcactccacctctgcaggacccctcctccccttgttgttctgatttctcacagctgaccttggggccagcctggaatgttgtacaaattttgttttatcacttacgagttctgtgaccttccttgacttactgaggtgctttaagtctcagattctaactctgcagctgggggtgatgccccctctccctcaaggtgatgtaaggatgagatgagttgtaggtaggttggtgcccactggaactggcacatggaaggcccctgaaaacagtcaatgaacatcatccctgcttatcagcattgagttgatgccaagggcctgccctttgtgagtgtcatgggatggaaaaggagaaacagagggaagaggcatgatgcgagaggaaggagggactaaaaggcacaggagcagggtgaggtgcaggcacctctgggacaatgtatgagttggtgccgcccagtgtgtcaagcctgcagaaaatggtgccaccatggaaagcaagggaatctgtgatgaggacaacacaagagactacactcaggccccatggcatctccttcttccctgactgcacaccttccctgcaaggcccctgtggtttcctctgggatagacttgggcctctatcccctttgccttcttctttctgcagaagaaaatgccccaggccttcctgtgggggccgtcgccggcatcgtgaccggggtcctggtcggagtggcgctggtggccgcgctggtgtgtttcctgctccttgccaaaactggaaggtaccacagctttttcccatccttctcccaccccctaggctgactccaggccaaaagaaaggagaccttgtcctgtattcagggccaggctctccacggcctcccaagtccccagggatccttccctcttattccacggctcctccctcgtcagctcctgaccctgggttgctgcctcaacagcttcctcctctgtgaatttggcccaattaaggccccacccctgagtgtggccctagttccctcacacagcaaagccacagctgcctggagggagggagagaaggagggagggaagtagggagggagggagggagggcgtgctctgtacttggtacctcccattgttcattgaatccatccacacagtgagggggatttgcaggctccggatcctgggcaccgtcacacaatggggagtggaccagcctggacaggctgggtggggtcagtgccccccatggctgatgtggtaaccataggccctgaggtgtgagatgggagaacctgggcctcagaacagcatgtcctggagcgtcctttgtgtctcttgccaaggggttgagagagaggacaaggacactgtcccatttcagcatcaccagccctgagtgcagggtctggccacagcagggacactgagttccaggagaatccaagacacttgcggtcccctccgtgtcctgcacacgtggccctgctttgcctctggggacttgacccttcctctcaggcaaaccctcgtggtctgtttccttccttgggtcctcagtccctttcctgggtccctgggtcaatgttctcctggcccggcatctgcctgagggtccttcccctctgctcaggacagatgtgggttcctaaagcctttcctcaactcccctctgctgggctccccctaacacaaacctgagggagacaggaggtctccatgcccatccttgaaaatgggtttcccttcttgtcccctgttcgaactccaaagttgtggcttttaacctggcaccctcccaaatgaccctgacctttcctagaaccagcatccagcgtgacctcaaggagcagcagccccaagcccttgcccctggtgagtgtcctctcagcccaggtgtggctgggaacccctaggacagccccacagtgtccgctcctgccagtcactgccaggcagactctgatcctttcccgggggctgcaaggaggatctcataaaacatcacacaggggaccccaattgcttgggtcagccctcacctgtgggctctgggtcatgggtcacctccccaacctcagctgctcaggtatcttagagctgaggaccccctacgccttcctggagaggggataaggctctcctcccaccctgctgctcactcctgtctctgtttccaggccgtggtccctcccacagctctgccttctcggtaagcctgtccccttccagcccctttctactggggtcccagctgtgcaggctctgggcagagggaccatcagccccccagcacagaacagacccaccttcccccaaaacacacaggacaaggctagccctgccctggccaggagctgggcctccctacagggtcaggaccacccacgccctgtgctgacccctccccgggaccctccatcacctgaggagacccctggagtgcagcaggtgcagagtggacactgggaccatcagtcaggggcccacattaacaagggtgcagggtgggcccagccaggaaaagggtcagggtgctgtgtccacactgggaggctgagctcaggggcagagctggtcactcctgaggggaaatgaccagaagtaaacacagagaagtaaatcctggccaatcagagacaggaaacttccaggctgggcctccatgaccctccctccctgtccacagatgtcccctctctccactgcccaggcccccctacccaaccccaggacagcagcttccatctatgaggtgagtgtgggccacggatgttctggtcccacaggccccaggggacccaggatcttcccctactggcatcggctgagctctgagattcaggaaactgctgtgaaaataagaacgggggtggcgagcagaggagggaggggcttgggagcaggaaccccctgagcacagccaggttcagccccagagcagccctggatgggcccagagcctgggagacgccacaccctgttctgaggagactagaggggtccaggcctcttctctgttttaacaggaattgctaaaacatgacacaaacatttactgccggatggaccacaaagcagaagtggcttcttagcttcctccaggagctgctcctgtgtgttgatggagagtccccaaggcccccagccctggggatggggaaggacatgaagcctgagccagagaaccagctataagtcctgagaagacactggtgtctgggggcagggagggatgggggtccctgatgaatatctggagacctcgacagcctgccctaggccctgggtgggtcaggacaaaggcctctcatcaccgcagaaagcgggggcttgcagggaaagtgaatgggcctgtggcccacctggggtcacttggaaaggatctgaataaaggggacccttcctctcattagctgtttttctgctagtgggaacttagcaaaaattcgcctgaaactccatatccattctctcctgggtcacacaaggaaaatgtcatctccaacttatttcaaccccagtctctcttccctgggaggcagaaatagggggttgggagtcaggctggggtggaccctacacaggaaagggcaggattcacaggagacctgcccagccagctgagcgcttggctgtgctcatactgccccagggacccacggtgcctagccctggccactgggtttcttctctgtccaaaaggccagtgctcaggacatctttacccatatcaggggacacacagagggcctgtcagagtaatcaaggtgaggacagacccagaatttagtcctggagtaaaatcctcccagacactacctgggactctagcccatcatttcccatcagttcccactttaccccctggagtggatctcactgaacaatcctccactccacacaggagattccaggtcagagacacagggctctctcacctaaagctcacgcagtctaccatggcaatgggacaacctctctcctcttctccctggcctgcagggccctccactcaggcctcaccagcagctccaccacatacctgggccggcagttctctgtccctcctgagggccctggggagtgtaatgatctcatgtaggttcactcagaccaggtgtccccttcccacaatcaggctggtccctgcactaaagcacagagccacggttcctgagggtattctgccactgcccagggttgtttgccatgagatgggaagtaggaaaaacaacctgcaaatttacatcaggatttagctctaaatgactccttacctcacttgtacacatcgtcagatgagacaaggtgatgtctcttgtgtcagtttcctgttgatgctgtgacaaattcccacaggccaggcatgttggtttgtgtcttggtcccacttactcaagaggctgaggcaggaggatcgcttgagcccaggaggttgaggctgcagtgagctctgatcacaccactgcacgctggcctaggcaacagagatgacaactccattgttaacttagtggcataaaacaacaacgtgtccacttggctgtgttcttcctggcagctccagggaaaagtctgttccctcaccttttccaattactagaggccgcctgcatccttaactttggccccttcctccatcttcaaagcgagcagtacagcatcttgaaacctctctgtgctctgcttccatcctcactgacttccccgcctccctgtctcacttgtatggttattttggacccacctggataaaccacaataatctccccatctcatcatccttcatttatctgctaagtgtctttgaccatgtgccatattcacagatcttgggatgaggatgtgtgcatctttgagaggggcttgttctatccatctctcctctcaaggccattttatcatgattgttcactacaaagtacacatgggcacctggatagggttatcctgactgtggcatcagtttttgcagtgacgtcccagcaccctccaggtcctgagagagggagacggagggctctccatgcccctagtacctctccaccttctcctcggtgacaagcttagttgttaagaataaaagagatgtgtctgggcgtggtggctcacacctgtaatcccagcactttgggaggccgaggcaggcagatcacctgaggtcaggagttcgagaccagcctgaccaacatggcgaaaccctggctctactaaaattacaaaaattagctgcacgtgctggcgcacgcccataatcccagctactctggaggctgaggcaggagaatcacttgaacctgggaggtggaggttgctgtgagccaaaataatgccactgcactccagcctgggtgacagagtgagactccatctcaaaaaaaaaaaaaaaaaaaaaaaaagaaaagaaaagaaaagaaaaacaaagaataaaagagatgtgactggaagatcacaactcaccagcccttcaatcgttcatggacatcagcaccatggatagtgaccacggaagggtcatccccaggcactgcagcagggagcgcacagatggaaagaaactgccgggaaaagctgcccagtctattctgcctgagaaagacacaatgagggagaacctgattcttctctaatttatttgttgtgagccctgtgcacatgactaaatgttagggttgttggcaaaggttgttgacgcccctggcagggctgatttctgtacccaaagtatgaccttggagaggctgagtctgctctggtttcccagtgaatgtccctacctctgagactcaagccattgtctctgcctacaacacagtgggaacttttcatgattaacttccgacccccgtgcctgaccttggaaccactaccatcacccagcctggagcactgcctgagcacagcatcctgttccctgagctccagctaagcccctgggaagctgagctgaaccgagcccctgaacaatcctctcagtgactccaggccaggcctcgtgccccatgtcagaggcctttgccatctgccagtccttcccacacaatcctcctgagggacaagtggaggcctgaacatctgtctcccagggtagggcccaacttctccaggagacaaaaacagaccagagtcctcccagtcaccctcaccctcctcattcccaccacttcccacccacagaggcaactctggtcctacagacccacccctgcccttcccaagagctcaggtccagtcaatcagtgtccctgcaggtcacacacacacaccactcagagtgctcagtggaagggtcactcaggtccccaccgagagtctcccgtgctttggatgggtcagaatcctcttcacatcccacatctgggcagtcaacaaggtcttctctgcactgtcctcgcacctacagtgtctgtcttggtcatcctcgtcatcttttctgagcacggccacagctcctaacaagtggggttaaggctcctgacagatagggttaaggcataggaccgtgattctgagggcttctcaggtcttgcctgttatgtgaaattagcatgtacaacacatagaatttgtatgtttacctcataattttaatgtgcacaccctttgatcattaattagtcacattaagaagagcctcccctgaatcgtgagttctaaggaggcaggagtacacctgtcctggtctctgctaagtccagtgacaagcacccagtctggcacaaggatgcttcataaatacatgtggaataaatgagatcctcttacaccctgctcacttccctgacttatgtgaccagacggaaactcctaatgtacaggagagaaaggcagaaatgctggagaccagcgagaaagctgttttttgaaagagcagcaagttccaggcctctaaagatacttctggactttacgtggtgcagagaaaaagacaaaaccaatacattcccttcaaaccactaaagtgggtggggccatagcctaactgagaaagaaaaagaccaaggtagggtacagttcccctaacccactttgtttccagacatcaaaaaatacagtttgtggtcttggactctgatgtggaaaaagtacaaaccaaaaattgtgttaccactaatttccttgctatgagcagtcatgaaatatcaatgtacaaccatacatgcaaagatacaaattcaaacagcacttcagtgaacattcacaggaccagtgtcagaggtctgcaaactaactacatttgttttaactttgaatttttaaataattgtagattcacagaaacttgaaaaaaaatgtacttggaggcccatcacccttcacccagcctccaccaatgttcacattttgcataactataattcaatgtcaaaaccaggaaagcgacattggtacaatctgcagagcttttttcatatttcaccagttatacatgcatgtgtgcgtgcatacatgtgtgcatttgtgtgtgggtgtggatgtgcacgtgtgtgtctctatgctatgcggctaccacagtcacaacatcatatgttgccaccccttcataaccacaataccctccctgtcccataactacttctggcaagcactaatctagtctacatctctatggttatgttatttcaagaatgttacataaatggaattgtacagtatgtatgttttttttttgtttttttttgtttgtttgtttgttttttggagatagagtcttgctctgtcgcccaggctggagtgcagtggcatgatcttggctcactgcaacctctgcctcccggttttaagcaattatcttgcctcagcctcccaagtagctgggattacagggattacagacgtgcgccaccacacccaggtaatttttgtggttggctggttggtttgtttgtttgtttgtttggagacagagttccgctcttattgcccgggctggagtgcaaaggcgcaatctctactcatcacaacctctgcctcccgggttcaagcgattctcctgcctcagcctcctgagtagctgggattacaggcatgcgccaccacgcccggctaatttttgtatttttagtacagacggggtttctccatgttggtcaggctggtcttgaacccccgaccttaggtgatctgcccgccttggcctcccaaagtgctgggattacaggtgtgagccaccttgcacagccttgtttttttcttttttaagtagagacggtatttcaccactttggtgaactggtctcgaactcctgacctcaggggatccacctgccttggtctcccaaagtgctgggattacagggttgagctaccacgcccagccatcatgcagtaggtatgcttttggtttttttgctttttgttttttgtttttgctcttgttgcccaggctggagtgcagtggtgcaatcttggctcactgcaacctccacctcccaggttcaagtgattctcctgcctcagcctcccaagtagctgggattacgggcatgcgccacaacgcccggctaatttttgtacttttttagtagagacggggtttcaccatgttggccaggctggtctcgaactcctgacctcaggtgatccacctgcctcgacctctcaaagtactgggattacaggcatgagccaccgcaccaggccagtatgtatgcttttgatattggctttgttctatcagcaaactttccttgagcttcatccaagttgttgcaagtatcaagagttactcctttttattgctcaggggtggtatttcatagtactgcaatttaatcattcacccattgaaggacattgaattcctttttagtccttggctattgcaaataaagacactatgaacattcacgtacaagtttccatgtgaaaatacttttttcctttctctgggaagaatgcccaagagtacaatagttaagtcaggtgacaagcccattttaagttttaaaaaaaattgccaaagtattttccagaatgactggagccagcatgcatgagtgcaccagcagtgtatgagtgattcagcttatctgcatcctctccagcatttggtgttattattatttatggtaccccttctattaggtgtataatgatatttcattgtggttttaacttgcttttattttcttttttttttttttactggagacatagtctcattctgtcacccaggctggagtgcagtgatgctggcccactgcaacctccacctcctggattcaagcaattctcctgcctcagcctcccaagtagctgggattacaggtgtgtaccactacgcgcagctaattttgtagttttagtagagacggggtttcaccatgttagccaggccggtctcaaactcccaacctcaggttatccgccctcctcggcctcccaacttgcatttttaatggctaataatgttgagcatcttttcatgtgtttatctgcatattctttttgctgaaatatctatgcgggtcttttcctttttttttttttttttttttttttttttttgaggagtcttactcctgcccaggctggaatgcagtggcatgatcttggctcactgcaacctccacctcccggattcaagccattctcctgcctcagcctccctcgtggctgggattacaggtgcgtgccaccacgcctagctaattttagtatttttagtagagaaggggtttcaccgtgttggccaggctggtctcgaactcctaacttcaagtgatccatccacctcatcctcccaaagtgctgggattacaggcgtgagccaccatgcccagcctcttttcacattttctaattggattttttttttttttttttcttgagacggagtctcactctgtcacccaggctggagtgcagtggtgtgatctcggctcactgcaagctccgcctcctgggttcaggccattctcctgcctcagcctcccgagtagctgggactacaggcgcccaccatcacacctggctaattttttgtatttttagtagaaacagggtttcaccgtgttagccaggatggtctcgatcttcctgtgatctgcccgcctctgcctcccaaagtgcttgggaggtaccttgtgatccacccacctcggcctcccaaagtgctgggattacaggcatgagcctccacgcccagcctctaactggattttttaatgttgagttttgagcattctttatgtattctagacacaactccttggctggatatctgatttgcaaatattttctcccaatctgtatttgtcttctttttctcttaacaaggtctttcacagagcagaagattttaactttgatttaaaaattcatcagtatttcttttatggatcgcattttgggtgtcaagtctaagaactctcttctttcactttgtcgaaaattaacgcacatacctgtgcacacctatttctaagtcccctattctctcccattgatatatgtgtctatccctcaatcagtcccatgttgtcttgattactataactatatagcaagccttatgaggaagagtgatttttcccatcttattattccttttccaaatgattttggctattttagggcctttccttttccatataaattttagagtaagcttatctaggtctatgaaaaaaaattgctgacatttagctaggaattgcattaatgtagatcaatttagggacaatgaacatctttactgtcttgagtcgtccaattcatgaacacatgtctctccaagtatttagttctcctttgatttcgttcatcggcattttgtaatttttatcatatagttcctgtacatgttttggtagagttatgtccgagtatttcattttctctggagcaattgtaagtggtactaggtttttattttggtttccactagttcattgtctgtatacaaaaatgcaattgaattttgcatgttgatcttgtatcttgtgactttattgaactcacttattagttctaaaagatacgtttttgtaaattcctggagatcttttacatagataatcaagtcatcttcaaatagagacagttttatttattattttcttcttcttttttacttttcgagacaggatctcactctgtagcccaggctggagtgcagtggcacaatctctgctcactgcagtctcaacctcccaggctgaagcaatcctcctacctcagcttcctgagtagctgaaactacaggcacatgccacagtgcctggcttttttttgtttttatttttgttttctttttttttttaagacggcgtctcactctgtcaccctggctggagtgcaatggcgtgatttaggctcactacaagctccgcttcccggattcacgccattctcctgcctcagcttcccgagtagctgggactacaggcgtctgccaccacatccggctaattttttgtatttttagtagagatggggtttcaccgtatcagccaggatggtctcgatctcctgacctcatgatccaccctcctcggcctcccaaagtgctgggagtacaggcgtgagccaccatgccaggccgcctggcttttttttgtagagatgggatctcattatgttgcccaggctggtttcagactcctgagcccaagcaatccactcacctcggctctccaaacatctgggaccgcacccaggcatgcaccactgcacccagcctatttcttactttctttcttttttttttttttttgagacacagtcttgctcttgtcacccaggctaaagttcaatggcacgatcttggctcactgcaacctccacctcccaggttcaagcaattctcctgcctcagcctcccaagtagctgggattacaggcgcccaccaccatgcctggctaatttttgtatttttagtagagacagggtttcgccttgttggccaggctggtcttgaactcctgacctcaggtgatctgcccgcttcagcctcccaaagtgctgggattacagctgtgagccaccgcacctggccctatttcttactttctagtccatatgtatttatttccttttcttgccttattccagtgctgaaacttccagtagtatattgaataaggatgatgagagtgggcacccttgcccttttcttagtattagagggaaaacattcagtcttacaccattgaaagtgcaaccaggcatggtggctcacacctgtaatcccagcactttgagcggccaagttgggcagataacttgaggtgaggagttcgagaccagcctggccaacatggtgaaacaccatctctaccaaaaatacaaaaaaaaaaaaaaaaatagtcgagtgtgctggcctgcacctgtagtcccagctactcaggaggctgaggcaggagaatcacctgaacctgaaaggaggaggttgcagtaagtggagatggtgccactgcattccagcctgggtgacagagcaacccctatctcaaaaacaaaaaaatttttaaggaatgatgttaaatgacagaagatgagaaagacagcagagtaagtctctccagccattatctcccagcagaaacatccatttgagcaactatccacacacaaaattactttcacaagagccaaaaaaaaaaaaaaaactcgaacacacgagtgaagctgggaagcgcccttggaccacaaagacaagcaaaaccacggttggaaggtaaagggatcagttctctgtgcttgcaacatgcctcccctcaagccattatggcaccacacgtggaaactccccatggacccatgatttttacactggaaaaactgagctaggggtggacatacagattccccatcattccgggcccctccacaaaagactcactcctgtattggcccatagagaacactgcaagtacctaaggccagttaaagacaaaaagaaggggtggggttgggcagccactgcaaggaatttggcagtggctctccatccctgccagaggagatgctgcaccaaagacactgtttacagaaaccatgctgcaggaagcatggtccacagatcctctggccttgagggcctggctggttctccacagggcccaggtgccctctgtggctctcccacctgccccatccaggtccgacatttcatcagcagtgaagctagtgccagactcgcctctaacctgggcttagggtaccccctagtgttgaaatggaagacaacagtcagtccactcacaatttctaaataagcccactgaaatagaatggtcacaaacaaactcaggctgtaaagaccgtaataaacacctaattcaccaatgcatagatagagacgcagatctaggaataagaatagcctaggaacgtgcctcgtcaaatagacagaacaaaatgccaatgaattatcctaaaaacatgcaaatgaatggtctggcaggcaaagaattcaaaacggctgttttaagaaaactcagagaacttaaagaaaacatagagaaacaattcagacgtttgtcagagaaatgtaacagcgaaagtaaaataataagaaacaaacagaaaccttgaagctgagaagtacaatatgaaatgaaaaatgtgccgggcgcggtggctcatgcctgtaatcccagcactctgggaggccgaggcggacggatcacggggtcaggagatcgagaccatcctggataacacggtgaaaccccgtctctactaaaaatacaaaaaattagccgggcgtggtggcgggagcctgtagtcccagctactcgggaggctgaggcaggagaatggcgtgaacccgggaggcggagcttgcagtgagccgagatcgggccattgcactccagcctgggcgacaaagcaagactccgtctcaaaaaaaaaaaaaaaaatgtgtcgggcatagtgctgcatgactatagtctcagttattcaggagaatgaagtgagaggatcacttgagtccaggagtttgagaccaacctgctcaatatagtgagacccccgtctctgaaaaaataaaaaatgtactgtgttcatggactggaagaattaatattgttaaaatgtccatactaaccatgatgaactacaaattcaactcagtctctagcaatatttcaatggcattcttcacagaagtagaaatataggccattcgcagtggctcgcgcctgtaatttcagcactttgggaggccacagtgggtggatcacttgaggccaggagttaaactacactgaccaacctggccaatcccatctgtactaaaatacaaaaattagccaggcacggtggtgcatgcctgtaaccccagctactcaagagggtgaggcaagagaattgcttgaacatgggaggccgagtttgtagtgagccaagatggcgccactgtactccaccctgggcaacacagcaagactctgtctcaaaaaaaagaaaaaagaaaaatgctcccaatactctgggaggccgaagcaggtggattacctgatgtcaggagttcgagaccagcctggccaacatggtgaaaccccatttctactaaaaacacaaaaatgtgctgggtgtggtggtgtgcacctataatcccagctacctaggaggctgaggctggagaaattttttatttccttattaatttcttcatttacccattggtggctcagtagtatgttgtttaatttccatgtgctggtgtgttttctgggattcctctcattattaatttctagttttatacccctgtggtaagaaaaatatacttacgccctgcctggtggctcacgcctataatctcaacactttgggaagccaagatgggaagatcacttgaggccaggagttcaagaccagcctgaacaacatagtgagattccatctccacaaaagtaaaaaaaaaaattagctgggcattgtggggcactcctgtaaccccagctatctggggggctgagcgaggaggatcatttgagcccaggagttggaggctgcagtgaactatgatctcaccactgcactccagcctgggcaacagagtaagaccctatctcttttaaaaaaagaaaagatacttaataagattcctacttttttgaatttattgagacttggtttgtggcctaagatatagtctactctggagaatgttccatgtgctgatggaaagaatatctattctgcagcagttgggtgaaatgttctgtaaatatcaggcctgtttggtctaaaatgtagtttaactccaatgtttctttgttgattttctgtctgggtgatctgtccattattgacagtggggtgtcgaagtccccagctattattgtattgcagtctatctctccctttagatctattaatgtttgttttatacactttggtgctccagtgttgagtacataaatatttataatttttatatcttctcactacattgacccctttagcgttatatagtgaccttctttctctcttttgatagtctttggcttgtagtctattttatctgatataagtacagtttcttatgatctagcaatcccactactgggcatttatccaaaggaaaggaaattatactgaagagacatctacaccttcatgtttattgcagcactattcacaatagctaagataaaaaatcaacctaggtttccaacaacagataaatggataaagaaaatgtggtatatacataaaccatggaatacattcagccttaaaaaaaaagaataaaatcctgtcttttggagcaacatggtggaactggaggacattaagtaaaataagccatgaacagaaggtaaaaccccacatgttctcattcatacgtagaagctttaaaaaaagttgatctcatagaagtaaaaagtagaacagagaatactagaggatgggaagggaggaatggaaagcaatttgttaaaggatacagaattatagctggataagaggaataagttctagtgctctataccaccgtaggatgactatatttaacaataatatattatatagtttcaagtggctaggaggatgttgaacattcccaacacaaagaaatgataaatgcttgagatgataggtatgctgattgccctgatccaatcactataaattgtgtgtatcaaagcatcactatgtaccccatgactatgtacaattgttatttgtcaattaaaaataaaatacaatgtttaaaaaataaaaataagtattgctactcctacacttttttggtttccacttgcgtggaattttttttccatcccttcactttcagtctacgtgtgtctttataggtgaagtgggcttgttgtaggcagtatgtagttgggtcttgtttctttatccctttagccaccctttttttttttttttttgagacagagtctcgctttgttgcccaggctggagtatagtggcgcgatcttagctccctgcaagctctgcctcctgggttcacgccattctcctgccttagcttcccaagtagctgggactacaggcgcccgccaccttgccggctaattttttgtatttttagtagagacggggtctcaccgtattagccaggatggtctcgatctcctgacctcgtgatctgcccgcctcggcctcccaaagtgctgggattacaggcgtgagacaccgctcccagcccattctgtgtcttttaaatggagaattgcatccattaacattcacatgattattaatcagtactgcagttttgttgcttgttttctggttgttttgcaactccctcttctttttctttctttcctattgtcttcctttgtagttaagtgattttctctggtagtatgttttaagtcatttatctttaagtgaatatattataggttttggcattatgattaccttgagctttacaaaaaacatcttatggattataacaaattaacttaaggagatgacaacttatcttagatcataaagaacagaaatgaagaaagcaggaaaaaatactctagactttaactcccttcccccaccccctacattttgactttatgttgtctcaatttacatatttttatatcgcctatctcttaacagtttgctgtagctattatgttcttgatatttttgtcttttgggcttcatactagagttattagtggattttacaccacagtgatagtttagagtacatattcatgtacttaattttatcagtgatttttacacctttaagtgttttctttttacatgttagtgttttttctttccaattgaagaaccgctttagcatttcttgtaagatgagtctgctggtggtgaattttctcagctgttgtttgtctggaagaaactttctctctccttcgtatttgtagggtggctttgctggatacagtgttcttggagagcaggggtttctaccttcagcactttgaatatgccatcccacccctacctggcctgtatgatttccactaagaagtctgttgcttggccgagtgtgttggctccatgcctgtaatcccagcactttgggaggccgaggcgggtggatcacctgacgtcaggagttcgagactagcctggccaacatggaaaaaccctgtctctaccaaaaatacaaaaattagctgggcgtggttgtgcacacctgtaatcccagctactcgggaggctgagacaggagaatcgtttgaacccaggaggcggaggttgcagtgagccgagattgtaccactggactccagcctgagtgacagagtgagattctgtcaaaaaaaaaaaaaatctgttgccaaattggaactcctttgaatattatttgcttattttctcctgctgcttttaggattctctcttcgtccttgacctttgcaagtttattatatgccgtaggatagtcatatttgggtcaaatctgtttggtgttctctgaccttgttgtacctaaatacttatctttttctagttttgaaagttttctgttttatttctttgaataagctttctacctcttgctcttccccaactccctcttaaacattaataatttttagatttggtttggagcattttttttcttttttttttctttttttttttttttagacagaatctcactctgtcaccaggctgcagtgcagtagcatgatctctgctcactgcaacaaatttttttgtatttttagtagagacagggtttcaccatgttggccaggctaatctcaagctcctgacctcaagtgatccacccacctcagcctcccaaagttgggattacaggcaggagccaccacacccggccagatttggtcttttgaggtaattttctatatcttgtaggtgatcatcattcttgttcattcttttttttctcctctgtgtattttcaaaaagcctgtgtttgagctcactgattcttttctctgcttgatccattctgctgttgagagactttaataaatttttcagttcagcaaatgtatttctcagttccaagatctcttttttgtttttttgtttgtttgtttgtttgtttttgagacaatgtctcactctgttccctaggttgtagtacagtggcatgatcatggctcactgcagcctcgacatcctgggctcaagtgatcctcccgcctgagcctcccaagtagctgggaccacaagcacacaccaccatgcctggttaattttttggttttttgtagagacagggttttgccatgttgcccaggctggtctcgaaatcctgagctcaagcaatccacctgccttggcctccaaaagtgcagagattacagtgtaagccaccatgcacagccagttctgagatttttgtttgtttgttttatttcaatatgtttgttaaatcactgagtttccttaaaactgctcttttgaattcttggtcagagagctcacatactgtagtctccttagggtcagtcactgattccctactttgtccaattggggaagtcatgattccctgtttgctgttgtttcttgtggatttacatctatgtctttgcattaaataattatgtattccagtcctgtctggatggcttgttttggttttcattagatgtatttgcttagagattctttgtaatttgtctgttgattttttttcctactaggttgctgcctcttttttggcagtaaatgatgccttaacccctggtttgccttggttctagtaaacaatcagagccaggcatggtggctcacacctgtaatcccagctactcaggaggctgaggtgggaggatcacttaagcccaaaagttcaagaccagcctggggaacataacaagactctgtctcaaaacaaaaacaaaacaaaacaaaacaaaacgccaggcacggtggctcacacctgtaatcccagcactttgggaggccaaggcaggcggatcacctgaggtcgggagttagtgaccagcctgaccaacatggagaaaccccgtctctactaaaaatacaaaattagccaggcatggtggtgcatgcctgtaatcccagctactcgggaagctgaggcaggagaatcgtttgaacctgggaggtggagattgtggtgatctgagatcgtgccattgcactccagcctgggcaacaagaacaaaactccatctcaaaaaaaaaaaaaaaaaatcaaagcgttgtccatcccaaatgagagaagtcccaaagggtcctggtagtgtgggaaggctggataagcagtttgtgctcaggacagctgtggaaggaacctgctatagcatagtgctgctgaaaagccactcatatttggtgtctcatttagccaaattgcagcgcagagtttccagaactgaagatggtagtgcagactcccccacccttgtctctgcctatcctcagggatatttctccctccaagcactctctgtgctttctgtggattgagaaagggtcaggtttcctgtcaggaaacccaagataatggggaggctatttgtccgtctccatctcacttttttcagtataaaaaccatgagtctagggaaattttctgtacacttggagcctggcagactcgggggaagggcatcatggatatggatttttttttaaattgcaagggtgagtcttacgtgtttacaaacaaaattatatgatttctgatatttaacccagggggtgaaagagtagatgagtatagatacaataaaatttgtcatgagtgtatatatatatatattttcgagatggaatctcgcttgttgcccaggctgcagtgcagtggtacaatctcagctcactgcaacctccaccttctgggttcaagcgattcttctgcctcagcctcctaagtagctgggactacaagtacatgccaccaagcctggctaatttttattgtatttttagtagagatagggtttcaccatattggccaggctggtcttgaacttctgacctcaagggatctgcctgcctgggcctcccaaagtactaaaattacaggtgtgagccatcacacccagcccatgagttgatatttttgaaactgttgatgggtacatgggcgttcactatacctttctcttcagtataataaactagagtttgtgggacaggcggagtggctcacgcctgtaatcccagcactttaggaggccgaggcgggtggatcacaaggtgaggagatggagaccatcttggctaacatggtgaaaccccgcctctactaaaaatacaaaaaaaattagccaggcgtggtggcgggcgcctgtagtcccagccacttgggaggctgaggcaggagaacggcatgaacctgggaggcggagcttgcagtgagccgagatcgcaccactgcactgcagcctgggcgacagagcgagactccatctcaaaataaaaacaaaataaaataaaaaataaactagagtttgtgtgtatatgtttgtgtacaaactctccttgtatatgatttgaaattttctatatgaaaagttttttaaaagagaggaaaaaaatatctagcccagaagagagaaaaaaaatagcccaaaagtttttggttctagtttcggttttgtgtttttgagacagggtctcactctgttgtccaggctggagtgcagtggtacgatcacgtctcactatagccttgacttcgtgcagcccagaagttttatcagtgatttctacagaattttcatgatggatcatctcaatcttatacaaactcttccatagggaagaaaaggaaggagtatttccccaactcattctattaggttagtataaacttgatattgaaaccagaaccaaaaaaagagtacaaaagaggaaattatcaggccaatcacattcatgaacagagatgcataaaaacctaaacaaggcattaggaaatcaaatcaacagcatatttaaaaatgaaacactatgactaggttttgtttgttccaggaaaagcaaaaaggtgatttaacattataaatctataagtgggcttttctgcccatggacgccgccaaagaagcatcgttagagtctcagttctccctgccgtcatgtctaagtcagagtgtcccgaagagcctgaacagctgaggaagctcttcattggaggattgagctttgaaacaactgataagagcctgagaagccattttgagcaatggagaatgctcacggactgtgtggtaatgagagatccaaacaccaagcgctccaggagctttgggcttgtcacatatgccactgtgaaggaggcagatgcgccatgaatgctaggccgcacaaggtggatagaagagttgtggaaccaaagagagctgtctcaagagaagattctcaaagaccaggtgcccagttaactgtgaaaaagatatttgttggtggcattaaagaagacactgaaggccaggtgtggtgactcatgcctataatcccagcactttgggaggccgaggagggcagatcacctgaggtcgggagttcaagaccagcctgaccaacttgagaaaccccgtctctactaaaaatacaaaattagctgggcatggtggtgcatgcctgtaatcccaattactcgggaggctgaggcaggaaaatcacttgatcccaggagccggaggttgtggtgagccaaggttgcgccattgcactccagcctggacgacagactgagactctgtctaaaaaaaaaaaaaaaaaagaagacactgaagaacatcacctaagagattattttgaacagtatggaaaaattgaagtgactgaaatcatgactgaccgaggcagtggcaagaaaaggggctttgcctttctaacctttgatgaccgtgactccgtgggtaagattatcattcagaaataccatactgtgaatggccacaactgtgaaattagggaagccctatcaaagcaagagatacctagtgcttcatccagccaaagagatcaaagcagttctggaaattttggtggtggtcatggaggtggttttggtgggaatgacaactttggtcatggaggaaacttcagtggtcatggtggctttggtggcagccatgttgttggtggatatggtggcagtggggatggctataatggatttggtaatgatggaagcaactttggacgtagtggaagctacaatgattttggcaattacaacaatcagtcttcaaattttggacccatgaagagaggaaactttggaggcagaagctctggcccctatagtggtggaggccaatatttgccaaaccacgaaaccaaggtggctatggcggttccagtagcagcagtagctatggcagtggcagaagattttaattagaaaacaaagcttagcaggagaggagagccagagaagtgacagggaagctacaggttacaacagatttgtgaactcagccacgcacagtggtggcagggcctagctgctaaaaagaagacatgttttagacaaatactcacgtgtatgggcaaaaaactcgaggactgtatttgcaactaattgtataacaggttattttagtctctgttctgtggaaaatgtaaagcattccaacaaagagttttaatgtagatttttttttgcatcgatgctgttgatcgctaaatgtaatagtctgatcgtgatgctgaataaatgtcttttttaaaaaaaagaaatatataagtggaagggggcatgagggagcttctagggtgctaggaaggttttgtttccttatctagctactatttacatgggtgtgttcaatttttgaaaaggcatcaaataatacatttataatctatgcacttttctatatataagtaatgtatcaattttttaagtattttaaagtatatattacttgccatattaagagaataaagggaaaactcatgactatctcaatagatgcagaaaaatcatgtaataatatttcctgagctgggtgtgggggctaatgcctgtaattccagtatttggggaggctgaggcagcaagattgcttgaggccaaaagtttgaaaccagcctgggcaacatagcaagaccctgtctctataaaaaaaaatccaaaaaaaactaataacatttgccatccatttcttaaaaatattacactaggatagaagagaacttccttactctgctaaagcacatctatccccccaacccccaaaaaagaaagcaaaaaaaacagcaaccaaaaaaaaatcattgttaataggaaaataggagcattccactgaaaatcaaggataatccaagagggccaagcacaatggttcatgcctgtaatcccaacactttgggaggctgaggtgagcagatcacttaaggtcagaagttcaagacatgcctggccaacatggcgaaacctcatctctactaaaaatacaaaagttaaggctgggtgtgatggctcacgcctgtaatcccagcactttgggaggccaaggtgggcggatcacttgaggtcaggagttcaagatcggcctggccaacatggtgaaaccccatctctactaaaaacacaaaaatcagccaggcatagtggcacacacctgtaatcccagctactcgggaggctgagacacaagaattgctagaacccagaaggcagaggctgcagtgagccaagaatgtgccactgtgctccagcctgggtgactgagtgagactccatctcaaataaaaaaaaaaataaacaaataaacagaaattagccaggtgtggtggcaggtgcctgtagtcccaggtactcaggaggctggggcatgggaattgcttgaacccagaaggcagaggttgcagcgagctgagatcacaccattgcactccagcctgggcaacagagagattgtctcaaaaaaaaaaaaaaaagaagaatccaaggggcagggcaggcacctgtaatctcagtactttgggaggccaaggcaggagaatcacttgaggacaagagttcaagaccagcctgggcaacataacaagataccagctgtacaaaatatattttttaaaaaagaataatccaaggatgcccagcattgtcaatattgtactgggatggcctagccaacacagatcagctgtcagtatttttttttttttttttgagatggaggctcgctccgttgcccaggctaaagtgcagtggcgcgatctctgctcattgtaagctccacctcccgggttcacgccattctcctgcctcaggctctggagtagctgggactacaggcgtccgccaccacgcccagctaatttttttgtatttttagtagagatggggtttcaccgtgttagccaggatggtctcaatctcctgaccttgtgatccacccgccttggcctcccaaagtgctgggattacaggcgtgagccaccgcgcctggccagtattttttttattattatttttagaaacagggccttgctctgtcacccatgctggaatgcactggcatgatcatagctcactgtagccttgaactcctaggctcatgtgattctctcacctcagcctcccaaatagctggaagtacaggcacacgccaccacactgagttaatttttatttttttacaggtgtaagccaccaccccgggccagctgttgttattaacaggttattattatctgcccagaaaaccccaaaaaaagcctacaaacaaattattagaagttataaaagagtctagaaagaagcctggctttaagatcaatatactatacaaaaatcaattgcgaccaggcatggtggctcacgcctgtaattctagcattctgggaagccgaagtgggtggattacctgagctcaggagtttgagaccagcctggccaacatggtgaaaccccatctctactaaaatacaaaaaattagccagacatggtggctcgtgcctgtagtcccagctactcggaaggctgaggcacaagaatcgtttgaacccggtaagcagaggttgcagtaagccgagatcacaccactgcactccagcctaggtgacagagtgagactctgtctaaaaaaaaaaaatcaatttcgcgtctatacgttagaaacaaacagaaaatataacttttaagagacaccatttataataacaataaatactacagattattttagactaaatataacaaaagatgtaccaaatcctaatacagaaaactttttaactttattgaaaaatattaacgaccttaaaaaattgagaggccaggcgcggtggctcatgcctgtaatcccagcactttgggaggccgaggtgggcggatcacctgaggtcgggagtttgagaccagcctgaccaacatggagaaaccctgtgtctactaaaaatacaaaattgctgggtgtggtggcgcatgcctgtaatcccaactactcgggaggctgaggtaggagaatcacatgaacccgggaggcgcaggttgcagtgagccgagaccgcaccattgcactccagcctgggcaacaagagcgaaactctgtctcaaaaaaaaaaaaaaaaaaaaaccataaggaatgaagacaaataatctaacaaagggttagtatataatatataaaatataaaagaaagcttacatatcaagaagaaaaagttaaccctatagaacaatacagcccccaccaaaatggtcattttacaaaagcagcacagtcaatgcacatatgaaaagaagctcaacctacttagtaaccaggaaaatacaaattcagaccctaatgagatatcatttcatacccaacagagtggcaaaaatttttaagtgtgaacagttgaagggcatgtatttcaacaaaaattctttaccctctcaccagtaatgtataactgctacaaccattttggaaaacaatttagcatttactcccaaagctgaacaaaccctacagccagcaattgtactcctgggtgtatacctatgagaaactcttacacatatgtacaagacatgtacaagaggacatgcataagaatattcatagcggcagtagccagagtatccaaaaactggggaagaaatccacacataattgacagagaatagatcaattgtacagatcctactgtacaatagcacagtaggatgtcatacaacagtgaaaatggaagaacaaagtcccacacgggaacgtgggtgaatgttagaaacataatgacgagttgtttaaaagcaagttccaagcctgggcaacatagcaagaccttgtctctactaaaaatttaaaaaattagtggagtgttgtggcacatgcatgtagtcccagctactcgggaggctgaaacgagaggatcacttgagcctgggaggtcaaggctgcagtgagccatgatcctgtcactaagttccagcctgggtgatacagcaagaccctgtctctaaaaataacaataataatataaaaagcaagttccagaaaactacatatgataccatttttacagagctcaaaaccaggcaaatctaaacaatatttattgtttaaaggtataatacatacatgacaaagtatataaaaatccaatccaagccaaactaaataaaatattgcttcctcatgggaggaggcaaaggagtggatggggaaaagaacacaggtaaaaagcaagttactcctgatgctccatttcttgggctaagtgatgagtccatggggtttgttaaatcacactccacatccaatatttttgttacatataatcctttgtatgtagcaaatatgtcctgtccctggtatcaggattaagccatccatttgtgacacctaggacaccatttcctttgacttgttaattccctttgaaggtcattgatgtcctcaaccaccttggctagtgggatgaagacaatctgtggaagtatgtcttggcccacccaggcctcagctcagccttctaaaactaatagcccagctggtcagatgttaggaagaggtgggcgaagcccactgataaaactcatctactaaaacctccctctatgacctaaagcctcttgtcgtaggctcgctggtctccacctagccctgttccacttgctgtgactattctggcttcccaaccaccccttccagaacctagattggtcatggaggtcacagaggtccatggtaaccgaaacctcgtgtcagtcccacttctgaggccaggtgcaggcacgtgtgcttcagaccccacttgctcaagctactaacaaaggtcagctccgtggccttgaggagttaagcctgtgtcctcgcctgtaaaatgcaaatacagaagtgatgacatctatttaataaggttgtagtaaggatgaacgaggtaatgcacagaaaatgcctaacccacagtaaaggtaccctacgtcactgcctctaaacctcacaagatagtgggagagaattaaactgagctcccacacataaatggcctgacacagcgactctccattccctacttcccacccctaaacacacaaactctgtctcacacacacacacacacactcattcactcaacttaaaaaggcatgaagttgcagggtgagtgtatctgctgcccccttatggccagagaaaagaatcacactgttctcctttcctaggaacccagaaccaaaactccgggtgaaaaacaaccaccccagccctgctctttcctctctcccctatttgccaacttaccaaaaaaaaaaaaaaaaaaaaaaaaaaaaaaaaaaaaaaaacaactactgagcagataaaataatctcaagtctccaaatctctcaatgaaattgcctcagcagggacagaaatctgcaggggaggtaagggagatgctactttgagcaggtttcacctcctagagctagtttcttctttgcaaaatagagacaaaagctgcctcactgaggtcttgtgaggattaaatgatatcctgtatgtaaaacactagcacagatactagcacagtgtctggcacacatagtagatactcagtaagtaatcccagataataatcaccctggtggtcaaacacagtcgctcccatgtaaaatcccagctactggggaagctgaggcaggaggatcacttgaggccaaagattcgagaccagaccgggcaacatagtgagacagacccccatgtcaaaaaaaggaaaaaaaaaaaaaagaattggcctgaggaggctcttctctaactcataagacccttccttttaaagaggaggaaactgaggcccataaaaagggagagatttggccagggtctcggaaatcagaccctgattagtagctgaacccaggctggagctcaagcctccagaggaaggggaaggagaaaaggaatatttcagctcccccagttgctgggcaggacactgtcactttgccaggctcctcttcctgggtccccacctccctggacatgcttggccttcctcacaccttcctcacccctgctctctcatggaccacaggacaatgcagaaagggaactctgctattttatttgttatgtgaaagagtctgggtgcttgtcgggtgcagctagatggtcagtccctgaaggcaaacaggaggcctaagacgacaccccaagcaggatcttgcctggaggatgctgcaccaacaatctgagacttctctaagatgttgaggacctcagtcactttgatgctcccaatatgatgaaaatctgctaaaagctggttatgttcacgagcacaccccatgaggaggaaggtggtattgagaaaccctgtaaggaagagagggagaagtcaggaacactttcaagactcaagagccctgccttcagccaggtgcagtggctcacacctgtaatcccagcactttgggaggccgaggcaggtggatcacttgaggacttaaggccaggagtttgagactagcctggccaacatggcaaaaacccatctcccttaaaaatacaaaaattagccaggtatggtggcacatgcctataatcccagctacttaggaggctagggtatgagaatcacttgaacctgggaggcagaggttgcagtgagccgagatcggaccactgcactccagcctgggcaacagagcaagactcccatttcaaaaaaaaaaaaaaggcccctgccttctccccagaggcccctcacaaaccagaacacctgctctcccatgagagacttaggcaccaggcgccttccccttcctccttggaattcatgtgccctgtcccttgcaaccccaatcccatctctggatcccaccagcctctctgagatgtgaaggtgctggacaatgcctggcagagagtaggcatttgataaacaatattcctctcctctcacctgcctgaaattttaaggtggaactgtaacacgtagaagcagccaaggggcaagaattagtggtgacaaaatttgggaggcaatccttcatgtgctcgcccacacaggtcgggcagctacaggacgcagatgtgatagacttaggagtgctggccttgagtttcacaaaaggctccaaattggtgaggttgttgcagagataagaccggcagacgcgactgtaggaggcaatggacactccgggtggggaaacaaggtaggagatttgcgcagggtaagacgaagacgagctgcagcctttaaagcccacgactccccttgcagtccctgaggagcagaggattgagagagctcagatcagtgtcactggcctcacccagagtcctccctccccccagctctttctgcacccaccctgcctgtcacaatctgtgcctccctccccaacccctgtgtccactcagtgcagctgcacagggctcagatgctggggtctccatctggatctcctcattcttccactgcaggacctcccccagcccccactcctctctcccttgtgccctcctccagggatctgtccacctccattctacccacttacccagcccacaacacaaccagtggggccctgcccctctcctgccagtgtcctgacattatccagatataaatgatggccaggcacagtggcttatgcctgtaatccggacactttgggaggccaaggtgggcagatcgcttgagctcaggagtttgagaccagcctgggcaacatagtaagaactccccatctcaaaaaaaattaaaaaaaatatatatacatatatatatatatgtatagtaactatgtggaattctaatctacagtccctcggtgctgggagtggagctgggggtcagaagagcaagcaaaacgaaattgatcaaacttagactgcttcacctgtctcaatgaacactagcgtctcctcgcagccctcttgcagcttacacaccatgttcctcatcagaagccacttccagttatggaaagcaacagctctgaatcttgaggctgttgcttcatagcacaaaagagctccagcccctaaaaagagaatgctctcccagtcattggcccctcatatcatcttctgagcccgttaactgccaaccaagagttcagcccccacaggtcctgtccccagcgaaacctagatacccagccctcgttccaccagtgacatgaatccagcctcccacctttctgggtcttatagcatccagccccacaggacatacgaggcagagtggagatggcccctagaaggcagaacagctgcacaagtctcaaatgctggggtcccatggccctgtgtctgggtcctgggtgctagaggtcagtctggaatcagtttcagtctggatcccaagctcagttcccatcagtccccgaattctttgtccacctgtctctgggtcactgtttctggagcagaaagttgattgcatcagcttctaggacataggctccctcagaccttctgggtcacaggtcttcccatctccactgtctgccctccagtctaacctgcaccatccaccatcttagcttctcaaagcaggactctcactctcccacttaggtcctcccattggacaaggtgctgagcagagaatcctggcttactgatatgcaggctgttctccagccagaggcaatgagatcagagaaacaaatagatgtttcaaactcgtgtgtgttgtgtgtgtgtgtgtgtgtgtgtgtaagttaacatatcactaaataacccttggttcaacatggaaatttaaaagtatttagaactgaggtcaggagcagtggctcacgcctgtaatcccatcactttgggaggctaaggcaggtggatcaccagaggtcaggagtccaagaccagcctgccaaaatggtaaaaccccatctctactaaaaaatataaattagccaggggtggtggcacgagcctatagtcccagctactcaggaggctgaagcatgagaatcgcttgaacccaggaggcggaggttgcagtgaaccgagatcgcgccactgcactccaggctgggcaacagagacagagactccatttcaaaaaaaaaaaaagtatttagaactgaataataataaacatattacataacacacacattcacacacagacatagacacagacagacacacacatacacacacacacacacacataagtgcatgtaaaatctgctgtaaactgaataaggtctgaagtctaggtaagagtactgtacaccagcccaggcatcacgacaaaatgccatctctacaaaaaatacaaaaattggccaggcatggtggcatgcacctgtggtcccagctacttgggaggctgaggtgggaggaccacttgagccccggggatggaggttgcagtgagctatgactgtacaaacagtattgtacaaatgtcaatttcctgctcatatactatggttatataagatgcccctacagggaaactggaggaaggatccaagggactctatgtaccacttttgcaacttcctgtgagccaacaatcatttcaaaattaaagggtttttaaaatatatacagccgggcacagtatctcccgcctgtaatcccagcactttgggaggccgaggcaggcagatcacgaggtcaggagatcaagaccatcctggctaacacggtgaaaccccatctctaaaaacacaaaaaaattagccaggcatggtcgtggacgcctgtagtcccaactacttgggaggctgaggcaggagaatggtgtgaacccgggaggcggagcttgcagtgagccaagattgcgacgctgcactccagcctggacgacagagcgaaactccgtctcaaaaaaaaaaaaaataaaataaaatatatacatcaaaatttgagacacagctaaagcagtatttagaagtaaatttatacttttaaatacatgtatcaggaaatgtgaagcattaaaaaataaatatattcatgaactagttcaagaaattgtataaggagcaacaaagcaattctctcctacccaaaaaagaatggaaataaggatgatagcagaaatcaatgaaatagtaaacaacaacaaacattattacaaaaaagatccattctatgaaaagatttagttagttcgctggcaaatctgatcaagggagaagatgcaggccggcacagtggctcatgcctctaatcccagtgctttgggaggctgagccaggaggatcccttgaggtcaggagttcaagaccagcctgggcaacacagtggcttatgccggtaattccagtgctttgggaggctgagccaggactgctcgaggtcagcaatttgagaccagcctgggcaacaccttgtctataccaaaaaaaaaaaaaagtttaaaaattagccaagcatgggagtgcctgtagtcccagctactcaggaggctaatgttgaaggattgctttagcctcaaatcacaaggtcaggagttcgcgaccagcctggccaacaaggtgaaacactgtctctactacaaatacaaaaattagcccggtgtggtggtacgtgcctgcagtcccagctactagggaggctgaggagggaggatcacttgaacccggaagccagaggttgcagtgagccgagatcatgccactgcactccagcctgggcaatagaacaagaccctgtctcaaaaaaaaaaaaaaaaaaaaagtgaagaaatgcacaaacccagcaataaccaaggaaatgcaatctgtcaaattgtacatctatcagactggtaaggatcagaaagctgggaaaagacaagtgttggcaggtatgtggggataaaggaacccttggcccctgatgctcatggcattatttggagggctggggaataaaacactatttctggactctgagaaacaaaggagttgagagttctgaccaggatctcaggcccaaagcagcattgcaggggtctgacactacatggtcaaattgggtttataaatacccatttccagtataccctacataggtattacaaaaatgtccaccttcatctacaaaggaacatgcacaataatgcagcattttttttttctgagactgggtctcgctctgttgcccaggctggaggacagctgtgctcactgcagcccccacctgccaggctcatgcaatcctctcacctcggccacccaaatagctgggactacaggtgtgcgccaacacacccagctttgtagagatggagtttttccatgttgccccagctgttatcaaactcctgggctcaagcaatccacccacctcggcctcccaaagtgctgggattacaggcatgagctcccatgcccagagaatgcagcattattgtggtgatggtaggttgagacaatgggagcttccctctctgagaccaagtgaatgcaaaacatgctggggatgtacgctatggaatatcacgcaggagttggaagaagttgattagatgtacacaggatgtgaggcagggtacagtggctcacgcctgtaatcccagcacttcgggaggctgaggtgggcggatcacctgaggtcaggagttcaagaccaagctggtcaacatggcaaaatcctgactctactaaaaatacaaaaattagtcgagtgtggtggtgggagcctgtaatcccagctactcaagaggctgtggcagcagaagaattgcttgaacccaggaggtggagggtgcagtaagccaagatcacaccattgcactccagcctgggcaataagagtgaaactccgtctaaacaaaaaaaaaaaaaaaaaaaaaaaaaaaaaaaagtacacatcatgacagaatgacagaatgtgtacatggatagattgtaaaatcacagtgctgattattacaaatagtatataacataatatcacttgcataaattaaaaactcaaacagaggtcgggtgtggtcgttcatgcctgtgatcccagcactttgggaggccaaggcagacagatcacttcaggccaggagttctggaccagcctggttaatatggcaaaaccccatcgctaaaaaaaaaaaaaaaaaaaaaaaaaaaaaaaaaaaaaaaaaaaaaccccaacaacaacactacacacatcctgggagaacacacacacaaaccaaaagatacatattaaccaccttagaatgagaattgcctataagaaggttagggaatgaaagtggggaattggtggaaaataacagtgtaggagggggtacaaagatcactgaccttggcctcagagacccaggttggaatctttaccccttcatttactagctgtccaatttgttgaactcagagcctactaccttctttataaaatgaagtataatacatctcatagggtcattgtgaagatcaataaaattattaccataagtattaggcaaatgctaagctctttataatcgttggttaccctgttcctctaccactatccctccctcccacacacacttcctctcactctctctccactacctaaaggatcaagttcaacctctttagctggcctttaagcctcccccgaccacaccccaccccaccccagataagcgccacccaacctttccaattttatctaggacagctcccctgcccagcagtccagctagaggtcacgtcggccacccttttctgcctgcaatgcctcagacacacatgctctgtaacccagaaatctgtggccaagaaaggtgccaagacccgcagaaaagctgggacacaggaaagagaaacgaaggctgacaacagatctcacgggggtgagggagattaggccaatcagagaagacagcacacgccagcctcagatgcagaacaactggacctggacctaacaagctgagtacaagtggagacgcaaccagaaaagattgaagtgaaatcctcaagcaaaaaaaaaaaaaaaaaaaaaaaaaaaaaggatggagcagtagtcagaggggatgccacccctacaaaagacaaacaaattgatggaatggaaccttgcagggagagagaggaccagcagagagagggaggcgtaggaaaatgaggagtggggcacaaaggtggggctctcagggagaagaggagtcgattttagagggggagaagaaaaggacacagagctggctgtacagagaaaaggggccaaggcagagaagatggcgggatggtgtgagacggagttcacagaaatacccagagaaggcgacgattacacagaggagcccccagaggggcgaactcttgaggaagatgaacgcggagggtggagccagccagaaattcagaaaaactagaggcgtccccggtagcgaaggaagccgggaaggggccaggctatcagggcatgaagcacgggagaaaatgggtccgaagagggagagcgtccgagagaaaaggaaaatcagagattaggaaaatcacaaccgacacaaagacaagaagagacacaaggaaaggggtgcaatctgaggaaggagggcccggtaagcaacccggtaatcacagcgctgggagagaacgcataaaagaagggtagctcaggagttgtggggcaccggaagagacataacagaaaacgcaggcctccactcagcaaaaacaagccacgcgcgaagtcgaggtacaaggcaagggaaggccagaaacgaggcaacccgtgcacagaccgggcttggtcaacgccccaggggcggggccaggcgggccgttcctggggggcggggccagcctcggtccaataaggggtactcgacgccccattggccacctgcctcgaaagggggaagacagtctgggcgggcaggacgtgcggagggagaggcagcggtggcgcgaggctcaactcgaagcgctattggtgggactgatagtcttgtgcgccaagaagctggcagaagggaaggggcgggacatcagttcaggatctcaaaccgcattggtcgtctgcctcggctgagagaggcgatgcttgaagttcattggtctttgtgagacagggtaagaaaagcagcgcgagcttggcggttcctctggccactttctcacagtgtctttgggcgtcttcttgactgaatctgactccattggaggctgtggtaaccgtgaactagctgcacgaacacggtccctcctgcctttccgtcctcctccctcttagccggactccctaacccaggcatcccctctcctccccctcgcgcccctcccgccctcgcgccccctctccccttccctgcctcgcgggccccttggcgcgttcccggttccccactcgctccctggggcacgggaaggggggagggggacatgcatgaaattaattgttggtagtggccacaggagcaggaagcgctggacacagtgacttcacatgtttacacaaaaacctgaataaggtgtgagcgcaagagagacattagtgccccaaggagaaggtttttggcccagatcagggcctagcacatgacaggggctcagtaaccatttgtggaatgaatgaaggagtgaaggaaaataacttgaaagtggggcaggtggcgggtgcggtggctcatgcctgtaatcccaacactttgggaggccgaagcaggcaggtcgcttgaggcaggtcaggagttcaagaccagcctggccaacatggtgaaaccccatctctactaaaaatacaaaaattagacgggcgtggtggcacaggcctgtaatcccaggtactcgggaggctgaggcaggagaattgcttgaacccaggaggcggaggttgcagtgagccgggattgcactactgcactacagcctgggctacagagtgagactccatctcaaaacaaaaaaaaagaaagaaagaaagtgggacaggggagccaagcatagtggctccagcctgtagtcccagctactggggaggctgcggcaggaggattgcttgagctcaggaggtggaggctgcagtgagccatgatcacgccactgcgctccagcctgggcaacagagcgagaccctgtcaataaaaaaaaaaagaaagtggagcagggaatccatgagaataaggtaattattgggggtgcaagagagggttctgatttaaaggggtacaagaacaaaataagactaaaggaatgcaaggaggcagttgctttgcagggcatagatgagactaagaattgaaattgaactaagaattgaaaggggcataaaactactggtaggcattggatgaatgcatgagagtggggtgagcattgttgaagaggatgccaggaaacactgttgggacggaacagggtgcttgtgaaaaggggatgtaggactcgctgaaggggtatgtgaggacatgagtaggttggaacctaggatgtgtgtgtgggtgggaaagtgtttggattgaaagaaaagaatgtttgaattgaaagaatacagaatgtcgggcgcagcagctcatgcctctgatcctagcactgtgggaggccaaggcaggaggatcgcttgagcccaggagttcgagaccagaccagcctgggaaacataatgagaccttgtctctataaaaataaaaaacaattaaaaaaaaattttttttttgagacagagtcttgctccgtcacccaggctaaagtgcagtggcgcgatcatggctcactgccagctctgcctcccgggttcacgccattctcctgcctcagcctctggagtagctgggactacaggcacccgccaccacgcccagctaattttttgtatttttagtagagacagggtttcactgtgttagccaggatggtctcgatctcctgaccttgtgatccacccgccttggcctcccaaagtgctgggattataggcttgagccaccgcacccggcctaaaaatttttaaattaaaaaaaggggggacgggtgcagtggctcatggctgtaattccagcactttgggaggccgagacaggcagatcacttgaggccaggagttcgagaccagcctggccaacatggtgaaacaccatctctactaaacatacaaaaataaaaaaaaatagccgggcatggtggctcttgcctgtaatcccagctactcaggaggctgaggcaggagaatcgcttgaacccgggaggtggaggttgcagcaagccaagatcgtgccactgcactccagcctgggagacagagtgagactccatctcaaaaaaaaaaaaaaaaaaaaagaaagaacacagaagaggaagaggagaggggtttctgaagaaggaagatacctgagaaatgtcatggggtaaagaggggagaaagctgggaaagaagccagaatcagggcggggtctaaagaggggcaggatggagacctgcaggtgtggtctccagggcaggagggttgttaggggcaggcccacctggctatgcttaccttccactcctgcccctagatccatggaacccagtgacatgcctgctggctaccactgccccttagactctgccccctgggatgagaccagagacccccagagcacagagctgatccccaggagagccatcagccgctctccaacctgcgcccgctgccgcaaccatggtgtcaccgcccatctcaagggccacaagcgcctctgcctcttccaggcttgcgagtgtcacaaatgtgtcctcatcctgtgagtatgaggtctgggaggggaggaggatgagcctcctccaaagggtggctgacctttgacttgcaactccccacttttagggagcgccgcagggtcatggctgcccaggtggccttgcgtaggcagcaggaggcgcagctaaagaagcacctgatgaggagaggggaagcctctcccaaagctcccaaccacttcagaaagggaaccactcagccacaggtcccctgtgagtgtctctgaccagcgatggggcaggagtttgggtacaggaggcaggtatgggaaaaagaggcccagtcctgctgctgaattggtgtacgaccttgaactaagggtttctactccctcggcctcagctgtcccagcgttgagagaatgcagcgagttctgtgggtcaaaaatgggctagaggccgggcacagtggctcacgcctgtaatccgagcactttgggaggctgaggcaggcagaccacgaggtcaagagatcgagaccatcctggccaacatggtgaaaccccgtctctactaaaaatacaaaaattagctgggcttggtggcgcatgcctgtagtcccagctactcgggaagctgaggcaggagaatcacttgaacccaggaggcggaggttgtagtgagccaagatcacgccactgcactccagcctgggcgacacagcaagactccatctcaaaaaaaaaaaatgagctagatgggggagatgagaactgtctggggttggggtaggataggggtcaggagaaagggctcattagagctctccctggtccttcacagctggaaaggagaacatagcaccccagcctcagaccccccatggggcagtcctgctggcaccgacaccccccgggaaggtaaggagaggctggggcctgagaaagtgtcccccaccctagttcctacccagaccctttcttctgtgccctcaacacctgggttctagccccagccctggtttgctatgtaatctagtcaaatcactgctcttctctaggcaaaatgaggggaaaacgagggcctcccagccccaaagttttggggttctgcccgtatcccagaatacactcaatccttttccagccttgtacccaactccagcctgtgccctctgcccctgcagaactcctgtgggcctctgctgctcagccatcccccggaagcctcgcccttgtcctggactccggtgcctcctggcccttgggtccctggacactggctgcctccaggcttctccatgccaccaccagtggtgtgccgcctgctgtaccaagaacctgctgtctctctgcctcccttccctggtaagatgataattcaacattcattcaacatatatttgagtgccaatctgccacatattggagagggaagaggaagaaagcataggtggggagagggaggaaagaaactatgaccttggcccctatacactctgcattcttttattcttattaggctttgaccctggcacctccctccagctgcccactcatgggcccttcaccacctgcccaggatctcacccagtactgacagctcctctttctggagagccccaagggccccctagccagccccgcacgtgagtagggagagaaggatgtgtatcataagcctaagcctgtgctgtgtccaaccacagtgctggtgtccaaccacagtggataatgaagatgaaaaggtctctgactaataggcaaggcagagctctcctagtactgccatttcctagctgtgatgctttggacaattatctttacctctctgagcctgtttttctatcagtaaattggagacactattacttacctctctgattgttgtaagaattagcaataatgtatggaatagacctagcacagactctttaatggtagctgttatatctgcttagacagatttgatggggtaagattgcctgctgatatggggggcagagatgatgagagcctcagagacccaggagaggggccagaggccattaggaaaagcttcccaaaggtgagccaagctctccttcaagttctatggtgactggggaactgggggaatgggacccagactctgataggtcagggacagtaatctcagtcttctaggtgtttttttaaaaaccggcatcaggtggggcctggtggctcacacctgtaatcccaacactttgggaggctgaggtgggaggattacttgaggccaagagtttgagaccacctgagtaactgagcgagacttcgtctctacaaaaaaattaaaacagccaggaatggtggtgcacacctgttttcctggctacttaggaggctgaggtgggaagatggtgtaggcccaggagttcaagcttatggtgagccatgatcacaccgccactgcactccagcctaggtgacagagcaagagcctgtctcaaaaaaaaaaaagacactagtgatttcccataatcctcacagtagccctgggaggaaaaactggcaaggatttttactttactgaaaacaaaataagtcaagacacagcttaatggcccagcaggctctcagattcccagatcaaaacatggcaaaatcctgcccctctttcaatgtgtgcatgtctgttcatctgtttaaccaccctggcatcttctctccttgtttctagacactcaactctgatactccagccctgtggcaccccagaccctcttcagctacagccacaggtcctgggaaagaagtgggatctagggccctgggaggaggttgagcctggggaaggaaaaagcaggaaactgaaggaagcaggggctgaggaacacttagagggtgggcagaagcgggggttcccagtctgcttgtctccctttcccttgcaggcctctggagcctcgtgcctggcccggacatctggcccctcagagtggcagctgcagcaagaggcagctgaagccctcgtggggctgaaagattcatcccaggctcctcgtgtgaccccttctgtgccccccaaccctgcctggatctccctgcttcacccctgtggcccaccaggtgggccatgaaaggagaggatggatagggatggctgggaaatggagatcactgaagtacacagggactaaccaaggagatgagggggtcgacaggttgaacgtcttcaggcccaggaccccaagctcctcagcctggcccctgggattgcagttgagagttattcagtgaatcctttttatcagtttggcactcgacagcaaatttcttgatatcaaggaaagtggggcactgagaaaggcagggacttgcccaagggcatatagtgagacagtggcagggaacccaatgctctgtctctggacccaggctgcctgctgaagtctgaagtggggtctggcctgggaggaggtctgataagtgccttcaaggagcttacgttctagttagggaaattggatgccttcacaaggctcagtgacaaacctgaagaagattggaggaaccttgaagagtgagaaacacctagggggacagacagggaaagctgcgaattctcttgtccaaatagtggattgggcagactggcctggaggaaatgctagaacagagggaaaggaggctggagaggcttctgatggtggagatctggcatgccaggcttaggtgtctagaacagcaactgtatgtgaaggggagccagggaacgtttctgaactaagcaaggacaaattcagagaccctgagctttagaaagacaagtgggtggctttgatggacggtttggaggaggcaagactggaggtgggaaaattagcaaggaggtctgtgaaataatccaggagaacaatgatgaggcctggattggattcggtaaaaagagggggttgctagaaggaaaaacaggtgtgacctgatcctgccccttccttcttgcctgtagctcctgctggaggaagaggattccagcctgttggcccctgtcttcgacccagcccagccccctctgttgctctgcatattggccgtctggggtccatctccctcctgagctagaaacccagagatggaggctgtcttgctatggcagggaggtgacagcctgctggcactgtatatttagtgtcttacttaaggatttatgcatggaatttaatgtagtacaagcttcgggcttttttgtttgtttgtttgtttgtttgtttaagctttcaggtgcttcattagctttcagttcctttggtagtgtgggcatttccttggctgacagtggatattcttgtacccttcttgggtcctgggatctcttgaaatccccaataaagagagagttgtgctatttaagctgaccagtatctataaacgtgtttgcatgagtttacatcccaggattccatgattctgtaaatgcctatgcattcatgtctgtctccatgcatgtgaaaacaggagagtgttttcattttgtgtctaggtttgtgtgagtaagcaagaaataaacctttgttgttgtaagccactgagatttggagagtgttaccacagcctaacctagtctatcctgactgacagaaaggacttgttcatttcgcttctcaaagtgaaaaatctgttatccaatagctaccatagatgaaaacaaacttggatttttttctttgtccaaataaaaaaaaatgatgtaaagaaataatgggggattcactgattaattgcccgctctgtgccaggcatagacagtttccagctgtctagaggggctacaaatcgaaatgcctacagggctgagcagatcaaataaatgagtaaagaaggccagatggaccctggcaaactgagaatggatgccttgcctaaggagcagcctccttttggccctagcagattactgccaggcgggaatgtggactcagtgttgctccatcttctgattttttaagagaaactggaaaactagatttccatgtaaaacatcttaattttcaaatgttggctcagttttcttctttaaattctatacgtgccaaataaaacatattttcaggctagctttggccagtggaataccaatttgatacattttccagatggggaaattgaggctaaccagaatagaaagaatcgagttagtctttatcacaagtttttcctcaactagggaggttcacgtgtctgagtttcgaaggatccataaaaggttaagaaacatttattaccatttattgagtgcccactccatttgattcacatatcttcacagcaaccctggaagttatgcaggatggttcccattttacaagtgaagaaacaagcttaaagaggtaaagtaacttgcccaagtgttttaggggaaatttctaggcagagatcagaggagggttccttctctttgccaggctccaaattagttaataatgtttataaagcattgggccgggtgtgatagctcacacctgtaatcccagcactttgggaggccaaggcaggaggatcgcttgagcccaggagtttgagaccagcctgagtaacacggggagaccctgtctctataaaaacaaataaataaaagcatagaatgaaagatgcaccactcctttccccaatcaggactccagaagatacatacaagtcaagagtttttcaaaaaagtcttttatttttctcctcaagatatcattaagaataagatcttacctgcatttgtttctcagtcctctggtgtcaagtccttctccttgaaccattccgtacataggaaaacctgttgagctattccaaagacatgaagcctggagacccccttcccattcccacccttagaaggggctcaagggatgtgcttgatcactgattctttttcctgatgttacctacaccccttgttttactcaagatgattgatggtgatgacatccaattacaacttgttatttcttatttgggattttgagagggtgggtttcttctcctccctagcagagtacagagtaacaaacctgcagcacttctcaggagatactgagatatcaggagaccaaagtcggcttcacacccttcttccctccccttagctataacttagatatatgattgctccttaatagacctgcctaagacttggtgtgccatgctttcctagtgacagatgaccagggccacaaagtcacagagaaaggaagcactgcaacatgcaacatggctgagattctgctactcagcactgaccaagggtcctctgtacaccaaggtcacagagctgagaagggtaaaagagaaagtataatttggggttaaaggatggcatgaaaaggggaggaaaagaggaagtgatggagattgggggaaggagtagactagaggccacctctccttcacctctcctccagtacccggccttcagtacccagcctgggcaaggcttttcacaccagttggccaggccaactttgtctttcaaatcgttagggccccccattagtgcctgagggaaagggccagagcttctgcagatgtcagtcttagggaaaagagcagatttaagagttgctcatgctcctaagttgttgcctgttcaggtgcagcactcttcacctgtggttgtagggagccagtaggctcctggcctcttcttggctctgagagattacagataatagactgtgagcactgtttcctatactgccccctttcccacttcccagtgccaggtagggaaaggtattgccatggtccaataaagtactgagtaaatcatctcccttctaaaccttctttgtgtaccctcttggcactctgcagacttaaccaatgaggtcccaactatgaagcaccgtccctgttcctctctctcctcacaagactcctccccacagtcacccaggttttatttcaggagcttatttcacattctgccctttgggaatccatgctcctttcgcttcagccctacattaacttgctccactcctgacctcaattctcgtccaacgtagaactgacatcatacacttatcccatccagcctatacgcagaccctcattgcttcgtccacataggcctcattctgcacccctgttccattgtgtagctggctttgcagccctgacacgtttgcataaatacagtcctataacccctaccctgcatgggccttcacaagatcctgaactcttcacaaaaccaaagttcatccttttcatccaactcaaaataatatgttaagcctctcaggcagagttccctatgttcccaaggggccactggtctctacttcatagtcctgatcaccctgagctgtgcctatctatgtccatctatgtctccccctcagagaataagcactctcagagcacaggacttgcctgcagctcctccttgggagctcagaataaatgactgagtaaaatacgttctgtctgattccttaggaattgttttttcctactgagttaacacactccaatgctgcccctctcctcatcaaaatgtgaactttctgacctcaaaccattttttctaagacagcctctgtcacccaagctggagtacagtggcacagtcatggctcacggcagcctcaacctcccaggctcaagtgaccctccagcctcagcctcctgagtagctgggactacaggcatacacctccatgtgagactaatttttattttttgtagagacagtgtctcactatgttgcccaggctggtcttgaatgtctgagctcaaccgatcctcctgtctcagcctcccaaagtgctgggattagagttgttttgtttgtatgtgtgtatttttgtttcttattattttgggattagagttgtgagccaccgtacccagcaaaaaaaccttcaggggccagatacagtggctcacacctctgatctcggaactttgggaggccaaggtgggaggattgcttgagctcaggagttcgggaccagcctgggcaacatggcaaaaccccctttctgcaaaaaatacaaaatttagccaggcatggtggcgtgcacctgtagtcccagctactcaggaggctgaggtgggagaatagcttgagcccaggaggtcaaggctgcagtgagccatgattacaccactgcactccagcctgggtgacagagcaagactgtctcatatatatgtgtgtgtgtatatacatgcaacacacatatatacacacatatacatatacatatgtatgtatatatatatatattatatatgttcatagcaaaatttagtggaaagtacagaattcccatagtccccttgccaacacacagggatggcctcccttttgtatcaacattccacaccagagtggtacctttgctacaatcaaggaacaccgtattatcacccaaagtctgcagtttacatcagtgttcactcttgttgtatgttctgcaagttttggcaaatgtgtaatgacacgtatccaccattacagtttcatagagaatagtttcattgccctaaacaacacccattcatccctccatccctccaagccgacaaccaattatcattttatcattttattgtcatcacaattttgcctttttccagaatgtcatatagttggaatcatacatttggattggcttctttcagttagtaaggcatttaaggttccaccatatctttcttttggcggggtggaggggagggggaggcagacagggtcctgctgcggagtgcagtggtgctggaacgcagtgcacttggctcactgcaacctccgcctcccaggttcaagcgattctcatgcctcatcttcctgagtagctgggattacaggcgtgcaccaccacacctagctaatttttgtatttttttagtagagacgggatttcgtttttttgttttgtttttgttttgagacggagtctcgctctgtctcccaggctagagtgcagtggcgcaatctcggctcactgcaaactccgcctcccgggttcaggccattctcctgcctcagcctcccgagtagctgggactacaggcgcccaccacctcccccagctaatgttttgtatttttagtagagacggggtttcaccatgttagccaggatggtctccatctcctgacctcgtgatccgcccgcctcggcctcccaaagtgctgggattacaggcgtgagccaccgcgcccggcctaattttttgtattttagtagagagggggtttcaccgtgttgcccaggctggtcaagaacttctaaactcaggcaatctgcccatctcagcctcccaaagtgctgggattacaggcatgagccaccgctcccggccagctcatttctttttagggctgaataatatcccactgtttgtaggtactacagcctcaacccatttttaaaactgtgtttaaagagtttattgaggccgggtgcggtggctcacgcctgtaatcccagcactccagtgccactgcactccagagcaggaccctgtctgcctccccctcccctccaccccgccaaaagaaagatacgggggaaccttaaatgccttactaactgaaagaagccaatccaaatgtatgattccaactatatgacattctggaaaaaggcaaaattgtgatgacaataaaatgataaaatgataattggttgtcggcttggagggatggagggataaatgggtgttgtttagggcaatgaagctattctctatgaaactgtaatggtggatacgtgtcattacacatttgccaaaacttgcagaacatacaacaagagtgaacactgatgtaaactgcggactttgggtgataatattgtgttccttgattgtagcaaaggtaccactctggtgtggaatgttgatagaaagggaggccatccctgtgtgtcagcatggggactatgggaattctgtacttatacactaaatttacaggcatgagcctgtaatcccagcactctgggagaccaaggcgggtggatcacaaggtcaggagatcaagaccatcctggctaacacgatgaaaccccgtctctactaaaaatacaaaaaattacccaggcgtggtggcgggaaactgtagtaccagctactcgacaggctgaggtaggagaatggtgtgaacccgggaggtggagcttgcatgagcagagatcacaccactgcactccagcctgggcgacagagcgagactccgtctcaaaaaaaaaaaaagtttattgcaaaagcttgagtatcttcagttgtggcttcaaatccgggctcaggctttaaccttatgtgaccctggacaaatgacttgactctaaggctcagttgactggtctataaccacctcacagagttgtcaattatgaacctgtaaaaactaacatgtacaaaaattaacaccagggacacagtgctgagaaactgtgttctctaaaatcacagactgccagaatttttaaaaatctttaaaatcataacaatagtgaaaatgggacatctcattcttacctggaaagtctaagtcactttgacacagagaagcagtcatgatctcagagaagcggtttttagagacaacattgtacatttatctaaactttctaatgtccaaggaagcagaatcctgggtctgctcctcgcccaggcatgatgttagctccgttgcataaatacatgcctgctttgccttatgtccatcaaaactctgctttatataaattttacctaagcttcactcttcccaaaatcctatattcaccctgtctcttcctttggtcaggcactccagagttcctctggagagctttaaaaaaaaaaattaaattcaatgaaatgacttaaatgaattaagtgtaaatgattcagaactggtattagaaattattaaaagtgggggccaggcacggtggctcacacctgtaatcccagcattttgggaggccaacgcaggtggatcacctgaggtcaggagttcgagaccagcctggccaacgtggtgaaaacccgtctctataaaaatacaaaaattagccaggtgtggtggcaggcacctgtaatcccagctacctgggagcctgaggccggagaatcgcttgaacccgggaggtggaggttgcagtgaaccaagatcacatcattgcactcccgcctgggcgacaaagcgagactccaactcaaaaaaaattaaataataattacttaaattataaaaagtgaatataaattacccaagtacctggagatttccagttagacatgcatatattacccactttgaatacatatggaaatatgtatgtgttggttctggaaaaacaattgagataatgaaaatattttctcaagttttagaaacagtatgagataggtttcaacaacattctacatgaatgtaaaaccttgatttaaatatatgatcttatgctagaagcatggttggttttaatttttctaacagatacgagtcttggcttattaataattaacacattttgcagccacagtatcagtgtggggtaaaattctaatatttgctcttatgttttaaattctcagtctttccaacataagaaaatagctacacacatttcagtgtttcctttttgcaacaagttaacataattttattggaccacgttatttagttgttgggccttgtaaggattaaatgagatcatgcatgtaacactacagtaacagccacatgataaatgtccaaataatatttacctgtgcctggcacagagcaggcactcaaaaaatattttttagagcatgtgacgcgccatgaaccagaggagccactttaaatggacaaacggggatctcattttttttttttttttttaatggtgagacaagccctgagaaggcaaatggactgcctaaagctacacaggtcagcggggcaggtaaatctaaattggcaaagtaagggctgagcgaacagactccgacactagaaggcagagctgaactaacttctgctaaggtcccgcctctgccgctttgtcccgcccttatcttctcccctcctccagcgcctcattcccttttcgctcgccccggccgtgctgaagcaacttccgccctgagaagggtggggcttccgtctcccgctctcgcgactcctggcggtgaaggacggaagatgatagccacatttcttcctcgcccttcccctaggttccctgtcacagttccgcccttactactcccacttccggccagggaacagccacttccacccggaaaaggggttgttccgccgtggggcgccagctgtggcccacccatcctgccccgtactttcgccatcatagtattctccaccactgttccttccagccacgaacgacgcaaacgaagccaagttcccccagctccgaacaggagctctctatcctctctctattacactccgggagaaggaaacgcgggaggaaacccaggcctccacgcgcgaccccttggccctcccctttacctctccacccctcactagacaccctcccctctaggcggggacgaactttcgccctgagagaggcggagcctcagcgtctaccctcgctctcgcgagctttcggaactctcgcgagaccctacgcccgacttgtgcgcccgggaaaccccgtcgttccctttcccctggctggcagcgcggaggccgcacggtaagcgggggctccgagctggaccgggcgcgaggcggcagggccggacgccgaagcctcagagcgcgtgcctgagggccccgaggcgcccggcgcgggcccgtcccgccccctagagccgcggccacgtgcgagcggcaggcccggacatgcccggtcagcgccgtccgggaaccgagcgtgggccccggggggcagcggcggggtgcgtggggcgtccggagtcccggggctggggagtggggtcgcgcaggatcctcacacgcaggggccgggctctgttagtgcgatccagagaggccgtgggcgtcggtgagctccttcagacccgcaggagccggagcccggcgttgaaggggccgtgggaagtaacggggggtaccacggtttaggatgcgctggagcgaaaggattggggtggggtccgtgctcttggcagtcgtctctgccaggcctgtgttcacatgcttgactttctccctcagatgcctggagttactgtaaaagacgtgaaccagcaggagttcgtcagagctctggcagccttcctcaaaaagtgagtttggggactgaggttcaaaacgggtggaggctgtcgccttggcctgcccatctgagccccagtgtttgccggtccctggcaggcgaggcttgtttggggcctccgtggctcctttcagcgtgaggcctggcttgtgttccggttccagcctctctttgtactctgggcacagcatagttgtgttgaggggagggcatttgggatatggggtagtttgtggagatgactgaatcgtgcttttcccactgttttggtcttaggtccgggaagctgaaagtccccgaatgggtggataccgtcaagctggccaagcacaaagagcttgctccctacgatgagaactggttctacacgcgagctggtgaggaacttaggtctttggctggagagtggggagctgggtgacccctggcacaaaccatacttccctgtctcctctgagctctttcccgccccaagagggagagaaacccttggttgtgtcaccacttgctttgtgtgatgtgacattcgataacttggtactccaagtttttatgacattctaagagctttgtgagaggaggacctgtggctttgagcctcaggggaaaccagagacagatgaatgttcatattttgcttacaggtggtttaatcctttctatatacacggaggcagactccctgggtttggatccatcttttacatctggctgtgtgtcctctggcaagttggttaacctgcctgtgcactctctcatccccaaaatgggactaattattgtaccagtactagagtattgcaaggattgaatgaatttaaagcagagtgtttagaacgtgtctgttgcacagtagttattcaggaaaaagccagttgtctttactattgctcagatcatcaagttagccttctccatatctctaacaggctgtttctaactaaatggttggagatctggccaggtcagtccctgctttaaatcttgacttctgatcttatggacaccctgcaacctcgtgccagccccgtctcttttcaatcttccaataataatttatgtacagtccctgactagtgttagttctcacgtgtcttaatatttcagtactcactaaatcttcactttcaggaagatgtaacagggtgggcggtggcagtgccgtgttatgtcaaggtgacagccttagcaccgaccttcactaaggggcctcggcctctccaatcttaaaccttctctctctgtgaagtggggactccatcctgaccacaacttgtctccagataagaagtaggtgggaagcagggtttggaaatcggcaaaactcctccatgacccggaaaagagttggccttggtacaggttgcttggcccttcagaatatgaagcattttgtagatttgtggtacacttgtgcctcaaatgtctattggggcccactctttcaggccatggagtgagcacagaggaccagcataactcagccgcggcctctgaggactgaaagatgaacttgctgaggtgggtcgggttgctggcataccacctacccaccgtttgttttagacagaaaatggggcggatgaagagaagctgacttccctgggcgcacagcagtgacaagccctggaagttacatatctcctccacctgtccccccatcttgctttggcagtgcctcaagggtcagttggtcagagcagctttggatctgggattagcctttctcatttgctggggtgaagacacgttctgcacataccaaatacctccaaagtaggactgtatgtgtcttgtacatttttttttttttttttaacatggggagggattaacaagagatggcattaagaccttggataataaacctagttgcatctgctggtcatggtagagctgctgtggtcccttgcagcccacagtggccctgcctggaaacctcaagcaggatgtgcatcttctgcctgcctactgatctccatcacttggagtaccccaaaggcctctttttcacctcacttgcccagctgtcctagcggcataggatggttgtgtggtagaccagaggcctgttgtgtatatttttgttgggttatagccacccctgtgtatctacatgcacaagggcagagttgtagttgtggcagaagctgtagcctacaaagcctgaaatatttcctacctgaccctttattatttattttcagggacagggtctaggcctgtcacccaggttggagtgcagtggcacaattatagctcactgcagcttcttgggctcaagtgatcctcctgccccaccctcctaagtagctgggactacaggtgcctatcagtcaccatgcctagctaattttttttatttgtagagatggagtctcactatgttgaactcccaagctcaagcggtcctcccgcctcagccttccaaagcactgggattacaggcaaagttgaccagcctctattctagagtttaacatgttccacccagtttggcagtcagcttatactgatcatgggagtgatcttgttttaccaaagaggaagctgtggtgcagacgggcgaagggacttgctgcaagttaccctgggagggcttggcagggtggctctgtccaaaactaggttccctgctatattcccttttttctactcataagagtctggcctattttgcctcctcagatttgaggctaaagtgtgctaaagcagcgcccttgctgagcagggccaaattgtggagacctataggaatgagtgtgaggtagacaggtcttaatcctggggtttgggggtaaagaggcccatggtagaagatggggccctcttgagggtggtctggaaatggagcagagctgtaggagtaagcagtcccaaggcagtggtgtaggaggcagggcaaggtagaggaagaacccgcaaagacttgctctcactggacgttcaagggatggccgccatgggtctttatgaagggggtggtgcagtgtagccccggacaggcttttttttttttttttttttttaaacagagttgcactgtcaccaggctggagtacactggtgccgtctcggctaactgcaacctctgcctgccgggttcaagcaattctcctacctcagcctcccaagtacctgggactacaggtgcccgccaccacgcccagctaatttttctatttttagtagagacgggttttcaccatgttggctgggatgctctcgatctcttgacctcgtgatccgcccgcctcggcctcccaaagtgctgggattacaggcatgagctcccgcacccagctggacaagcctcttgctgtcttaattctttaaaggacctgctgaagatggagatgtgggagtccagtttggtgtcctggtgtgcgtctgagagcagctgctgaattgggatgtctggaaacacttcttgtaggttggaggctgctccatctctggctcctgcatggggctgggcacccacttgtgctatgatagtagaaagaatgagatctgggaggcatcacagaagtgagttaagggatgaatcaaggtcaggagagtggtttcttacaagttcggcagagaagggtcagctagagtgtgctggggaagttcttccctgcctttgactcagtaggtcaggatgggaccaccggtctggactttgctgagctgtgatgactcctaaggagccgtgcttggttggtctgccccgtgctcagatccagagggaccctccctctcggtctagcaggaacacagctgccctcccttgaccatgaactcacagtagagtggagaggggtggcctcctttacagttccaggtagggggtgattcctggacaggggttcctgagaggagtgggttgccatcccaagaatgcacacagcagaggagcagaaggcctctagcatggaggaactggaggagaacccatttgtgacagcaacttgctcgcaattggccctcatgagtaccagctacggcggtctgcatttgtgcagctccacatcaaaagctggggctggaaccttggtctccagggggtgaggaaaaaggtcagtgttttaatagaacgcggtatttcaactcttagcattttccaatttgtgaagttaataacccttcctctcccttctagtgggtcagaaaaaaataattagcatgaactgggatagcaagggaggagcttgtaatatctgaccaaggttctccatgccaaaaggtttttatacagccttaagaaaaatttaagcctccattgaagaacctaataggcctttgggaggccaaggcaggcggatcacctgaggtcaagagtttgagaccatcctgaccaatgtggtgaaaccccgtctctactaaaaataaaaattagccaggcgtggtagcaggcgcctgtagtcccagctactggggaggctgagacagaagaattgcttgaaccccggaggcagaggttgcagtgagtctgagatcacgccactgcactccagcctgggcaacagagtgagactgtctcaaaaaaaaaaaaaaagcacctaataggccttatgggagcttgttctctaccagtcactgtgctcaaggtttaagtaaagtgtctcctttagtaccgcagcacaaaccacctggaggataggtgggtcctgtgtccctcctgaggaggaacggtgtcaggattcaagctcctgtctgactgctctgggcgctagtcccaacccaacaagactgaggttgagtgtcccatttctggtgtacagccgctttgggcatctctgcgcttaggagtgtgtgccttattcttaaaaagcaagataacagaggcccggcgcggtggctcacacctgtaatcccagcactttcggaggccgaggcgggcggatcatgaggtcaagagatcgagaccatcctggctaacatggtgaaaccccatgtctactaaaaatacgaaaaaattagccgggcgtggtggcgggcgcctgtagtcccagttactgtagaggctgaggcaggagaatagcatgaacccgggaggcggagcttgcagtgagctgagatcacgccactgcactccagcctgggcgacagagtgagactccgtctttaaaaaaaaaaaaaaaaaaaaaaggccgggcgcggtggctcatgcctgtaatcccagcactttgggaggccgaggcgggcggatcaggaggtcaggagtttgagaccagcctggccagcatggtgaaaccccatctctactaaaaatacaaaacattagccaggtgtggtggcgtgtgcctgtagtcccagctactcgggaggctgagacaggagaattgcttgaacctgggaggcggagctagcagtgagcccagatggcaccactgcactccaacctaggcaacagagaaagactccgtctcaaaaaaaaaataaagcaggataacaggaaaagctattctgcgttccccagtcctgggtactgtagttcaaatgggagagcaggtctccacccagagccccagggcacaaccagctacagggcccagagggatggcagcagctgctgggtatttgagctggtctgaaagggtggaggtttccagtgatgtcactctctggcaggattgtggggggtggcttacgccaggtgagtctgtctattggtcctggttatgggcacttattaccaggcagtggcgtagggggtagggcctggagtgaggtggggattttaaagtgagcagatgccagaggtagtgagccaacagcagggctgtgctcttggcccccagcagagcatggttgtatagtatcagctgaggattggttccaggatgaaccccaatacccaagtccacagatgctcacccttactataaaatggtgtaatatcggggccaggggccgggtgcggtggctcaaccctgtaatcccagcactttgggaggccaaggcaggtggattacgaggtcaggagattgagaccatcctcgctaacacggtgaaaccccgtctctactaaaaatacaaaaaaattagccaggcgtggtggcgggcccctgtagtcccagctactctggaggctgaggcaggagaatggagtgaacccggaaggcagagcttgcagtgaaccgagattgcgccactgcactccagcctgggcgacagagcgagagactccatctcagaaaaaaaaaatatcggggccagcacagtggcacacacctgtaatcccagcactttgggaggccaagatgggtggttcacttcactccaggagttcagccagagcaacatggcaaaaccgggtctcttcagaaattatctgggcgtggtggcttgcacctgtagtcccaactattcaggaggtcaaagctgcagtgagctgttaccactgcactccagcctgggtgacagaatgatgccctgtctccaaaaaaaaaaaaaagtataatatttgcatatatcctatgtagatgttttacttttgagacagagtctcactctgtcacccagtctggagtgcagtggcatgatcttggctaactgcaacctctgcctcccaggttcaagtgattctcctgccctgcctcagcctcccaggtagctggggttacagcgggtgtgccaccacacctggctaattttcttgtaatttcagtagagatggggtttcaccatgttggccaggctggtctcaaactcctgacctcaggtgattctcccgcctcagcctcccaaagtggtgggattacaggcgtgagccactgcgcccggcctgatcccatatattttaaatcatctgtagattacttatagattaatacaggccagacatggcacatacttatagtcccagctacttaggaggctgaggcaagaggattgcttaagcccaggagttcgaggctgcagtgagctatgatcacaccacagcaccccagcctgggtgacagaatgaggccctttttttgtgttttaagaaaaaagaaaaagcactaatacggtgtaaataattgttacactgttttgaattgtagtttttttcccctaaatatttttgatccacccttggttgagtctgtggatatgaagggctggctgtatctggacctgatctcagggcaggagtgggctgggaacaagcggtgtgtaagaactgtttctgggcagaagcagcccaccccacacagactactgcctggcacttggcagttatggaagaacccccaattcccccacttgatctttagaactagaggaaagaaatcactagagcagactcagaccaacttgctgatctctgggtcccaggaacaaaccagactctgctctgagctccagagctaggcaggaccatgtgatggctgaaatctgggtgcttcctgcatgtgggccccggtgccatcacagtggcaggacagggcagttcctccagagctgtgtgacacggagccagtgagtaccctctggcacctcagtttcactctttaaaggagagtagcacttgacacacctgttgagtcctcagagtaacccggccctcaggtgaagaagggtggagagatcgaaaagcatttggcacagggcctggcagatgtgtgctccagttaatagaagcgtgcaagcgtttctggggaggctggtgtgtcgactggattttacggagctttttttgcaggcaaggaggctggctggggtggaccagggacttgcccaagccagccttccctgtgtctgcagaggggctggtacacattccaagcagggggcacccactgcacagagtgtctgccctgcccttgttatcctgagctctccagactgaggtggcccggagagtggcaataggtcccttcactcctgcttctctggggcccatggagatggtcacagctaggctccacccctacataacctcaggttcaattcaacagcagtgctgctgggatagtaaccactaaagaagttggccctggagatggtgggagtgcccacccagggtgcagggctgtttgtcaaggaagagctagccgggggggtgggtgaggagagggggctgtcagtttctgggtgttagtgtgtgttttcagtttcccttcttataaaacagtgagaattagctgtttacacacaaggaattgtttacctgagaccttgatcaagacccttaaatctccctctcacactacccccagcttccacagcgcggcacctgtacctccggggtggcgctggggttggctccatgaccaagatctatgggggacgtcagagaaacggcgtcatgcccagccacttcagccgaggctccaagagtgtggcccgccgggtcctccaagccctggaggggctgaaaatggtggaaaaggaccaagatgggtaagcagggtagagggggctgcattgatggagtagccttgaggcccggtcatcaattccccaacgaatggtcctgcatagtctgcccagcccctcaggcccctcctatcagaggcaggcaggaggggattctgcagaaaagcaaacagcacggggcctcaccccgacctctctggctgactagcccaggctccaggagggtaatttagcgactatctgctttcattagcctgctcgttaacttttcccaattgatttttcggggcttttgatctaaatgcttgcacaaacaacaccccgtcagctcccaggggggctcccactactgcccccagctcgttagaatgcacctgactagggccctcagtgggacttggctggcggcaggtggctttttgagaagcctggctcacagccaggagggaaggggctgagaacaggacctgtgctcactggggcctgcatgacccttccctccccacagcggccgcaaactgacacctcagggacaaagagatctggacagaatcgccggacaggtaaggcctgcgtttggggtggggctgggtcccttagtcgctgcccaagcatttccaaagcccatactttgtcaggtagacttatttccttctctggagggcacagcccagggtgctggtggggtcagaggagggctgcccagagacaggagaaaggacagtcctgtctgacttttcctgttggtgctgcttagaaatttggaggcaggctggctgtggtgtctcacccctgtaatcccagcactttgggatgccgaggcaggcgaattatctgaggtcaggagttcaagaccattctgaccaacatggagaaaccctgtctctactaaaaatacaaaattagccgggtgtggtggcacattcctgtaatctcagctactggggaggctgaggcacaaaaatcacttgaacccgggaggtggaggctgcggtgagccaagatcatgccattgcaccccagcctgggcaacaagagtgaaactccatctcaaaaaaaaaaaaattggagggaactccagcccaggtgccactgggcatctatccacagagcacatagctgtacccgtagatgactccccctccccaggtcagcctgcgatgtttccccttagtcctcatgcgtactgagcatcacatgggctgcttgggagaggtggagataagggaggggggctggttcagaacccaggtctccattcagatcctggctggccaacaccctggggcagagtggccacacccctggtgccacagtctcctgtcttggcctccctgtggccaaaatctacccttggccacctcaagcatggtagtgaggagtcagtgagctatagtacagcaggagcacccagggcctggcatgagctcaattctgtatcactgactcaggcctcctaggagccttggagcatttagtcagtcaagtgtcacaaaagaatggaaagtgtcagccctctaggagttgggggtggtctggaaggagaaagctcttccaggcagagtggggcttggcgcacacatcattgctggtggttggatgttggccttctcacatggcagtgggcggaatttggactccactccgccactcccttcctttttttttttttttttttttttttttttttgagacagagtcttgctctgtcgcccaggctggagtgcagtggtgcaatgtcagctcactgcaacctctgccacctgggttcaagcaattctcctatctcagcttcccgagtagctgggactacaggcacacaccaccacacctggctagtttttatatttttagtagagacagggtttcaccatattggtcaggctggtctcgaactcttgacctcaggtgatccacctgcctcggccttccagagtgctgggattaaaggtgtgagccactgtgcctggccactcccttgagactcagtttccacgtctgtgaaatgggggaatacccacagtgagaattagatgagatagatgcatttgaaaccacaaatcggggtgcccacctgtggtgggtagttaggtagctgttacaaagtgccccagcagagacccccttgactaacttttattcttccatcttttcccacaggtggcagctgccaacaagaagcattagaacaaaccatgctgggttaataaattgcctcattcgtaatcctggtctgggtctcttttttgagtctcttgctctgtcgcccaggctggagtgcagtggcgccatctcagctcactgcaatctccgccttctgggttcaaatgattctcctgcctcagcctcccaaagtgctgggattacaagtgtgagccactgtgcctggtctggtttgggtctcttgattgttcttcaggggcatgaggaagaggcgcttcctcccttcccttgggtgagggggcccagggtgattgggtggctgtttacccggcagccagtcgggccttcccaggtcaaacagttcccatctgggtttggaggaaggacccaggggcccttgtggctcactcccccacatcctgtctttgcaattgtcagaaagtgagaaacgaaaggatggctgtgagctgtgacctcagctgggcctgggctgcagaggtggcttccgctggagtaaagcaagagggcccagggttcatgctcttccctggaaggtagaaaaggacagaccaccagggagcctccaccgcaaactgacctgtgctgcctacacactaactttcctgggcctggggcctgcacaggctgaatggtccttgagccttcactctgcatctgagcggtcttgggcccgctgagtggcagtggcaggaagtcggtggaagcagatccctgtgcagaagttgaattaccagggcggccacacacgggctgcacaacctttgcagtcgtgcacggcaagtgggatgtggcctccgcccatgattgggcacctggtcaggctgggagatccaaatagcacccagtgggcagctgtccgacccctggaggggcaagccaggaaagaaacttagggcccgctgtgaccagatgtccctcccagttgggaagactaaactggtttggccaatatctcccaggattcccctgtccaaattattcctgggatctgacccatttcctggaaaggggcgagcctgggttttgaagttcaaactagagtttaaatcacaactctgcccctaatcccacgtaaccctgtgcaccttatcctctgagccttcgtctcctcgtgtgtaagcctgctaactcctgagagactggacaagatgccgtggagagccttggctctgagtagctctgctgctggacagttcagttggcagtccccaaacgtaaggcgtaagagtttaagaagtatcggccaggcacagtggctcacacctgtaatctcaacactttgggaggccgagacgggctgatcacctgaggttgggagcttgagaacagcctgaccaacatggagaaaccctgtctctaaaaataccaaaattagttgggcatggtggcgcgcacctgtaatcccagctactcaggaggctgaggcagaagaatcgctcgaaccccggaggcggaggttgcagtgggttgagatcgagcaattgcaatccagcctgggcaacagagcgagactccatttcaaaaaaagaatcaataaaaatgttaaaagcaccgttgtttacactcagcaactctgtgaagtaagtgccgaaaagtgctttggaggtaggtaaagtaagccataggctgggtaacttgccagatatcccacagctggagccatcatatgaacccaagcaacccagctgcagcctggacctagccactccaagggctctgtgcctcagaaaagaggcccaaagggttgcactctagctgcaggccagtcactccccattctgggctctagtttcctcttttggccattaatgaaaacatttcccagagctgacatgagaactcaatgccaagcgtccggtttgcacagcagcaggcattgcgcttcccaggtaggaagcaaggtctaggtgtcccgagcaggcctgcaatcccgcagccgcgccgctccagccactggggagcagtagagggcctagaaagaagctcagccaccgaaggctcttgaaggtgaattcctagggcttccaggtctggagccaggcttattcctgggagggggttgtaacggggaattgaagtgcagaggggctagtgaccccagcagaacacctggggtcctggttcccagggctacagaactgtcctagatactgtgccaaatgcactgcagaatattcttgcagtcttatcaagtggggggtttgtacccatgttataggagaaaaaactgagtttcagatgaccagtcagttggcagagctgagttgtaaaagaatcctggactcttgaggcccaggctcttctgcgtggatgggaattgcccttttcccatctcctgggttcacgccattctgcctcagcctccccagcagctgggactacaggcacacgccgccatgcccggctaatttttgtatttttagtagagacggggtttcactgtgttagccaggatggttttgatctcctgaccttctgatccgcccgcctcagcctcccaaagtgttgggattacaggcgtgagccaccgcgcccagctggcaattgcacttttttaaaattctgcactctaggaggcagaggtgggcagatcacttgaggtcaagagtttgagaccttggcctggagtggtggctcacacctgtaatcccaacacttggagaggccgaggcaggtggatcacctgaggtcagaagttcgagaccagcctggccaacatgatggaaccctgtctctactaaaaaatacaaaaattagctggacgtggaggcaggagaatcgcttgaatgcaggaagtggaggtcacagtgagccaagattgcaccattgtactccagtctgggcgacaagagtgaaacaccgtctcaaaaaaaaaaaaaaaaaagagtttgagaccagcctggccaacatggtgaaaccctgtgtctatgaaaaaaaaaattggctgggcatggtggtgcacacctgtaattccagctacttgggaggctgagacaggagaacagcttgaacccaggaggcggaggctgcagtgagccaagattgtgccgccactgcacttcagcctgggcaacagagcaagactccatctcaaaaaaaaaaatctgaaatacttcaggcatgcaagtatttagcattcagtattcataatgtaagaaaaacctatgaagcacaacccagtttaagtaacacaggcagggcagggtgcagtgcctataatcccagcacttcgggaggccaagctgggagaatcacttgaggtcaggacttccaggccagcctgggcaacacagtgagaccctgtctttacaaaaaatttaaaaaataggcccagtgcggtggatcatgcctgtaatcccagcactttgggaggccgaggcgagtggatcatcaggtcaggagattgagaccatcctggctaacacggtgaaaccccatctctactaaaaaaatacaaaaaattagccggtcatggtggcatctgcttgtagtcccagctactcaggaggctgaggcaggagaatcacttgaacccgggaggcggaggttgcagtgagccaagatcacaccatcgcactccagcctgggctacacagcgagactctgtctcaaaagaaaaaaaaaattaaaaatagccaggcatggtgtgtgcacctgtaatcccagctacttgggaagctgaggcaagagaatcacttgagcccaggagtttgacgttatgattatgccactggacaccagccttggtgacagagagaggccctatctctaaaaaagaaaaaaaaaaaagtggccagccacggtggctcccgcctgtaatcccagcactttgggaggctgaggtgggtggattacctgaggtcaggagtgtgagaccagcctgcccaacatggtgaaacctggtctctactaaaaatacaaaaatatagccaggcatggtggtggccgcctgtaatcccagctactgaggaggctgaggcaggagaatcacttgaacctgggaggcagaggttgcagtgagccaagatcacgccactgcacttcagcctgggtgacaaagcgagactccgtctcaaaaaaaaaaaaaaaaaaagtaacacaggaaataaaaccaagacaagatgagctctctgtgtctctgtgtgtccctccccagacccaaccctggcgtcccccagaggtaacccctcccaggaactgggcgtttgccactcccctgcacgggtctacacctctgctacaaacgtgtgtccctaagcagcggacgccttttgaaaacaagtcaactgtatcatgctacgatattttttctgatgtttgtgctgtttctgagacagccttatgacaccttcccctattctgtagcattctgttggctcactttgccacagtgtatgcacccattctcccacaaatggacttttcatttgcttctcaatgtttgctaccaaaaatctccctgcaataaatttattttatatatccccttgtatgtgtgtgagggtcccctaactgctcacaaatatctcagcaactccgccctccccactcagacctcatttccctcctaccagacatgctcaaaggaaactgggagcaacacaaagatgactttgaatctctgtccaccacccctagactgtatgacacccgcaagtgacaacctcccctctctggcctcggtttccccctctgtaaaatgggggatggcctaccttgccagtcatggcaggtcaatataaaacaacttctggctgtgcacagtggcacatgcctgtaatcccagcactttgggaagctgaggcaggaggattgcttgaggccaggagttcaagaccagcctgggcaatatagcaagatcccatccctcttaaaaaaaaaaaagaagaaaaatatatgttgttgttgttattattgttattattagagacagagtttcgcttttgtcacccaggctggagtgcaatggtgtgatctcagctcactgcaacctccacctcctgggttcaactgattctcctgcctcagcctcctgagtagctggaataataggcatgtgccacaacatctggctaattttgtatttttagtagagatggggtttcgccatgttggccaggctggtctcaaactcgacctcaggtgattctcctgtctcagcctcccaaagggctgggattacaggcataagccaccatagctggcctgtttttttaaaaaaagaattccagtaaagagctgatcatggttctcactccttgaataccaggaacaccatctcgtatcacataatgagacagggagacattctggtcctcatctcacagatgaaaaatgtcaagcttcgaaggatcaaagtgcccacctagtcacacgggtagtcagccacaggtcagcctgccttatttattcttcatgagtatttatagtgactaacatttactgggcgcctactgtgggccatttctgtgcatgtgacaacccctttaagtccttgtttctaatcccaagaagcaaggaaatggggtcagggaagggacaaggtttgcccaagtccaggcagggggagaggtcaagctcagaaccatcacctgcccatgacacatgcccaggactcaggttccctaggcttccttccaaaggctcagcagtgacgagccagcccttgaaccagcctcttcccccacccaagcagccacctctcaggggaattgtggccaccacaggtgcagggagcagtttctctccactcacagcctgaagcatacccggcaggggctgtccccaggcccaacaagcaaagggcccagtagcgagggccactggagcccatctccggggggctgggcaggaagtagggtggggtttggggtagggatctggtaccctgggactgctgcaactcaaactaaccaacccactgggagaagatgcctgggggtccaggagtcctccaagctctgcctgccaccatcttcctcctcttcctgctgtctgctgtctacctgggtatgtggccaaagggcaggaactggcgggaggtgggggaagctgtggaggctgcagagagggcacaggcagagggaagggggctcagggaaaggggaagaggaggcagaggataggggacccagggaagatgcctatagaaatcgtatctgtgccaagatgggccaaggtggggctggagggagcccagcgaaggagaaggggcgtccacagtctcacacagggaggcaggagcaagagtcacctcccccacctcctgttccccacaggccaaaataaggaactaaagttgctcttgactgagcaccagggctgggggcaggaaggggacttaggggtagcagcattcagcgtctgtcaaggggagaaaaagctttctctgccttaaacctcaggtgcctctctctgttgggagtcccttctcagcactgggggaatgggtgtctcatggactccccctcacctgctcaaggacagctggcaggggctgtggccacgctaacccaggagttcagagaaaaaggttccccacccaaggggacactgggagcaaggattggagttcacgtctgagtcttaagcccgtgacgatgagggtgctcggcccctctccccatctcttcctccttctctcttcctcacctccctcctccacctacctccagaagaggggactggccatgtgggaggcctggctgagagctggggcttcccagaggagcccggattggacactgcagccagcctgagccgcctcgtctcactcagagacacccccagtctccaccccgctctgagccccttcaatcaccagcagcccagcccaaggactgaactcacccctgacccctaggttgacacatacaacttacagagaatgagggccaggcacagggtcacaggccagggcaggccacagactggctcctcagcccaggcagggagaggccagggagccaagagtttgaacccagtgccactcctgactgcctggtgatgctggcaacccgcctgccctcccagagcctcagccatccctcctgtaaaatggggctaaggagagaacctacttctagggttctgtgaatgattacacaagaaaaagcgccaggtgctgggcctggctgaggctggggtgcaaaaatggaccgggaaggctgcgggaggaggggacgcctgcactgcttctggaaggagctgtctggacagcggtcctccagtgcctggaacaaacatccaaaatccagagagttcacagggccagagtacaaagtgggtatgcgggaggggggcaagagatggcgctgcagaggtgagaagggcctcccaggggtcttaccatcccagggagtctcattctcctctcccaggatatcctcacccaccccaaccaggtatgtcctctctccttcccaggggcttcttcactttcccgcatcccccctctccccaggatgtatcagcccctgtcaggggctctctctctccctccccacccaggagagtcctcaccctcttcccaggagtgctggaactgcaggggccagggctggggaaatgtgtcaccatccccagtccctgacccacccaccctgtctctccacaggccctgggtgccaggccctgtggatgcacaaggtcccagcatcattgatggtgagcctgggggaagacgcccacttccaatgcccgcacaatagcagcaacaacgccaacgtcacctggtggcgcgtcctccatggcaactacacgtggccccctgagttcttgggcccgggcgaggaccccaatggtacgctgatcatccagaatgtgaacaagagccatgggggcatatacgtgtgccgggtccaggagggcaacgagtcataccagcagtcctgcggcacctacctccgcgtgcgccgtgagtggcccagccctggcccctactcccactgtcccgctggggacactcggtttatctttgaagtggggatagagccagtaccttcaatgtgggtttcaaaccggcttggacagagggacggacattctcctctgcagagtggggtctctggggggtctggggccttgcaggaggtgggcggggccaggaggctagggagggcaagaggggccagggctctgagccatactacctccttgcagagccgccccccaggcccttcctggacatgggggagggcaccaagaaccgaatcatcacagccgaggggatcatcctcctgttctgcgcggtggtgcctgggacgctgctgctgttcagggtgagccccctcggacctctgagtcagccgggcgagggcctgggccgagggacccccaatacccaggtagccctctagagcctgaggttccccatccaaaacttgggagaatgaaagcacccaccatataggggctgtgggagttaaatgaatgaatataaagaagggacttgaactggcgctgagcccagggggtgtcttcaatttagtttccccttctgggctgtcctcacgtccacctccccccaagaagagtctcattcttctccctaagagtgtcctcactcccctcctgccctcacccaggagtgtggttaccctccaggtgtagccaagaccagggaaggtggggcctggtcctcccagaatctctgatctgtaccagcctctccttaggcactacagaaagtgtgactgttattgttattattcatggagaatagtaagggagtggagactcaagaagacgctagcttgggaggccgaggcaagaggatcacttgaggccacaagtttgagaccagcctgggcaacacagcaagaccctatctctacacacacaaagtcttaaaaaaaaattagccaggcatggtggcacacacctatagtcccagctactcaggaggctgaggtgggaggattgcttgagcccaggagttcaaggctgcagtgaaatatgatgttgccacagcacttcagcctgggcaactgagggagaagaaagagagagagagagaaagagagagagagagagagagagagagagagggcgagagggagggagggaaggaagggaagggaaggaaggaaggaaggaaggaaggaaggaaggaaggaaggaaggaaggaaggagaacactggttgtagactcagagagaactgttacataaccagtatgtggccttggggacatctcttaccctttctggaaaagtacttcctggcatccaggagggtctgaaagatattcacctccccctgctcactgaggcacccaccccacccacccctacagaaacgatggcagaacgagaagctcgggttggatgccggggatgaatatgaagatgaaaacctttatgaagtgagtgaagggtggggatggggtaggggcagttgtgttaggggtgggggtgttccctctgggggtggctgggggcagggaccccaggtgtcagggtgctgatgttcgctgcctcatttccatcccagggcctgaacctggacgactgctccatgtatgaggacatctcccggggcctccagggcacctaccaggatgtgggcagcctcaacataggagatgtccagctggagaagccgtgacacccctactcctgccaggctgcccccgcctgctgtgcacccagctccagtgtctcagctcacttccctgggacattctcctttcagcccttctgggggcttccttagtcatattcccccagtggggggtgggagggtaacctcactcttctccaggccaggcctccttggactcccctgggggtgtcccactcttcttccctctaaactgccccacctcctaacctaatccccccgccccgctgcctttcccaggctcccctcaccccagcgggtaatgagcccttaatcgctgcctctaggggagctgattgtagcagcctcgttagtgtcaccccctcctccctgatctgtcagggccacttagtgataataaattcttcccaactgcagaccttggcaggagtcgtggatcttacgggaaccgcctctcccacatgtccctcagacccaggagtcccagcccaagccactccctgcccactccccacacctgggaccaggtagccagtctgggctgccctcctgggagaacaagatgtctcttgggaaggtccccagaccaactgaaggactggtttggccctctttgcagggcctcaccctagggtcatatccttaagcaagaaggggacaagatcaagatggctgtggctaccaaattacttacacttttttttttttttttttttttgagacagagtctcactctgttgcccaggttggagtgctcactgcaacctctgcctcctgggttcaagcgattctcctgcctcagcctcccaagtagctgggattacaggcgcctgccaccatgcccagctaatttttgtatttttagtagaggcggggtttcaccatgttggccagactggtcttgaacctctgacctcaggtgatccacctaccttggcctcccaaagtgctgggattacaggcgcctgccaccacgcccggccgctttttttttttttttttttttttttgaggcagagtctgactctgtcgcccaggctggagtgcagtggcgcaatctcagcccacttcaacctccacctcaagcgattcttgtacctcaggctcccgagtagctgggatgacaggcatgtgctaccacacccagctaatttttgttttagtagagacagggtttcgccatgttggccgggctggtctcgaactcctgacctcaagtgatccaccatgcttcggcctcccaaagtgctgggattacaggcatgagccactttatgcgtatttaagccttggaaacacagggactatcttgtggattggggctagtacagaattcagactgcagccttttcccgatgcgttgacttacagaaggggcattttggagggtctgtggtcctaacctggggatagcagggagatcccggggcaatgacagagaggcacagagacacggatttcctgagaaagggagaggagagaggctgagacccagggatcatgaaggggacgagcaagggaaggaagagatgatgagaccctgggaatccgggagagagacagggacgtggagagaaagggacagagagagagcgagaaggaaaggaagagacagaagggagaaggggcaaccgaaaatgggcacgaagaggcccaggcacagcaacagctggggaaatgacagagactgagacggagatgcagaaagatacagagagagctggagagggtagagaagggctttcggggagaaagtgatggagggacagagaggagaggtggaggccaaggagggaaagaccccagtagagaaagacagagggacagagaaggggatgcagacgcaggcgggagcacacccacagaggcgaaggaagggcgcaagaccatgagaaccacagacgcggaaagccggggaggtcgtggctcggtctagggcgcacggggagcagggcttgccccccagcacctccggggaggtgaccccagccgggagatgcgagtcccgcggagcccgcgcccggcggacggaccgatggacaaagccggggagagctcgggcgcggccggggcgggggccggtgcccgcagggacccgggcgcagcggggaaaggaggggcgggcaagcggcgagaaggggaaggaagcggaggtgccgggcgggcgcggggcgcgggcaggaagcggggaggggcggcggggcgggggcctccggaaaaacgccccgacttcctgccccgccagagccaggaagcgggagccgggacccagggcccgggatcgccgagcccgacctcgggcgccccgccggtcacctccgcgcggacaccaggtactcggtccccggccccgcccggcctcctcccctcggctgttgggggaagtggggaggaggagggaggggctggggcgctgccggcagcggaggggcccccttcggaccccacggaaccagcggccgcccctccttgggcctcagttttcccatctgtcaaagggagcaaagaggggagaactcacacttgacgagtgccccataggtggggacgaacggtgcgaggccggggccaaggcctcccacctgctcagtggagaacggacgatcactaccattgtacgggtggggaaaccgaggcccggggagccaaaccgactcgtcccagggaacgcacatcgtgagaaagtgtggagttgggatttgaactcgcacgtgctttccgcaaagcgccatcctccaacccccgcatgctttagggccacctaaaaatgaaaaacaacaataacaacaacgacgagggtcgctgtgaagctgaaagttgcagagtgcatttgaaagagttttcggaaagctcttttctaggtcattaattataccgtgagagacaggtgtagggagagagctggaggccttctcccattgtacggatgggaagactgaggtctacagagaagtcattactttttgcagattacactgcatgtcagagggaaagttgtgctggaactcaagactattgcttttccggttccaaaggaaggggctgggggtgggagacggaggggattgatgtacgaggattggaaattcagcgggtcccctaagtggggagactaataggacggggagccccagtccgccgtccgagtgctcagcgctggggtgactaggagatctccgatcgaactcgggaggagttggacccatctgcacctccgggcgcggggcggggcccggggagtgacgggggcagtcgagatacggaaacgctggccctccaagacaggccagagcggccctatctggcctgcgtggcgcagtacagcgctagagcggccggcgggaggagtagagtcgtcggggccggagcccggcaggagccgggctagagcggctggcaggaggagtggagctgggcgcaaaggtggactcagggcggctagagcgacgcggcggcaggggtggggagagtgcggagcccgagcgcggaggcttcggttccggtggcggcgatggcttctctttccacctggagcaggtgagggacgcggtccccagcgggtgtcagaccctgactctgcacgtcctccccggcatccctggccgtgcacactgccacgtcccccgtaggatttagggcccgcgtaagacccgccacgtccatgtaagatttgggtctcgtgtagacccgcctcattccgtataaagtcttacagaccctccaggttcctgccagccccccatggagaactggcttcttatagacgtggggtcctcatagaccagtggcatcccctagaatccggggctctatagaccatgggtctcgggacccaccacgcacccctatggaattctgagtcccttttaagtctccagaggttccacagactggcagctgtccctatagaatcatgatcctgtatgatccctggatcctttagacccactgtgtgtcaaatagaatctggggagttacacattccaacgactcttttaggttctttaaggctccagaagttcttggagaccctgagtcacctgctcaacacattatagaccctgagacctccatagaactcaacacccatgtggccccccaacccatggaccttctaaaccagccctaaccccccagcgccccatgcacgcagtgttccctctgctggaccccccaggccttgtcagttgcctatagatccatctattctctgacagcttcacctataattctccagcctttgtgggactcccccaaacccctcctcctaaacaggcgacactcctcgcctccatcatctccaacccccaagcctctgtggagcagccgtatccaacttgcactcctgcctaggccatagtgaccacatacccgtgacttttccaggcatccataagaagacatgatgtgtctcagagctttggttcagattttagtttctgaagggtagggtgggggctccccatgctctgaagcaatgctctctgttttattttgttttatttatttatttatttatttttgagacgaagtctcacttctgttaccaggctggagtgcagtggcgcgatctcagctcactgcaacctccgcctcccggattcaagcgattctcctgcctcagcctcccgagtagctgggactacaggctcgtgccaccacgcccagctaattttggtatttttagtagagacagggtttcactatgttggccaggatggtgtcgatctcttgacttcgtgatccgcccgccttggtctcccaaagtgctgggattacaggcgagagccaccgtgcctagcctattttattttaagacaaggtctcactctgtcgcccaggctggagggcagtggcacaattttggctcactgcaacctctgcctcctgggctcaggcgatcctctcatcttagcctcccaagtagctatgactacaggcatgaaccaccacacctggctatcttttgtagagatgggggtttcaccatgttagccaggctggtctcgaactcctgagctcaagtgatccacctgccttggtctcccaaagtgctgggattacaggtgtgagccactgtgtccaccaaatgcagtttattttaaatgcgtaaactctgtagcccaactgcccaggtctgagtcctggttctgcctcttatgagctgtgcctcagtttccttctttgttaaatggaggtgagaataataatgatctcttggagtcaccgagaggattaaatgagttattacctgtcaaccagcgatgccatgcctggcacatactaagtgtctcttttgtgtcagctgtcatttcattattattgtgataaggaataaggagataagaacttggcaagtgcacagttccagacctggcaccaagcacttgcaaagataatgagtatcccctcctttgcctttttaaaatttccctgcctcagttgagcgtttctacctctgagtgggatgagcatgcaccctccacgtccgtggtcatgtttcatagtgagacagggtctcactgtgttccccaggctggtctcaaactcctgagctcaagcgatcttcccaccttggcctcccaaagtgctggggttacaggcatgaaccacctcacctggccagtttgcaaatttattaaagtgaatgtttaacagtacttgaatcttgaattgcccaagcttagatattggacaatacactttgtgggaaataataaaaatgatgccttccccaggtggacccacagggtggcatttggacactccagaaagcatcattgtttaatcatcaaaatcctggttaccatttactggggagctagggaggaggcccataaagcaggagaagggcgggtctctgctggcttgggttataaatagctttgggctgtggggagccccgccgctggtccaccccacccctctttccacagctccttcccacctgacacgggctccgtggcattagtcagactaattaaggacacagaagatgtcggtggaaagactcagagagaagtggagactcaaggagagacaaagatgggagagacagcaagagatgggggagaaaaagggatggagagatgagagacagcacatgagactgtgactcagagaggtgtgaggatggtggctgcagaaaccagatgtgggaggacagaggcacagagacagggacaggacagacggagctacagaagcaggaagggggtgtcaccgctgagagggagagatggagggaggagaggcagggatggtggggaaaatgagacagttctggaggaagggaaagagaaaaatcaggaaacagggtgaaaagagaccaagacatgagacagattcaagggacagacagccaaggagagctggctgcggacagaccaaggcgcacgtagggtggaggggacagacgcaccttggagatgggctgtctgaggccccatcacttggtttctgggactggaagcctgggaagagatgaggtccctgggggaaagaagaacttctgggtttggggactcccagtccctgagggaggagggttctgagttttgttttcttatgtggagagttgggggttgggggtttgccattgtgacttcctgtcacaggaagtggggctggtgggttccaaggcaacatcctgtcccaggcctgtcacagaccagaggagacccctgcaccccacttctctcccgcctctcctctaaccctcccatcccctcttgcctctgggctgtgccctcaggaattagcccccaggcccctggtccctccaacctgggagtccaggcccccagccccctcttccattagggcattagggaccccagattgcaggctgtcagactcagccttcccatggacccaggctcctgagcctccaacgcctgcccccgcaaggctcccgtccctgggctcccgccccctggcgggtctctgaagggctctttgtggccacacagaggccccattgagctgcggaggctgggatgggggaggctgtttactcaccttcacacctgggccaggaatctgtgagtaaccaccctgggccgcctcctcccaccctcctaaccacagcccctcctcttcctccagccctgcagagcccagggagatggaagacttcgcccgaggggcggtgagtggacagagcaaggggtgaggcgactctggggctgtgggtggagagtcctgtggactgaagctgccctccctttccacaggcctccccaggcccctcccggcctggcctggttcccgtcagcatcatcggggctgaggatgaggattttgagaacgagctggagacagtgagtgggagatagggtggaaaagctctgtcccaggctcagtgtcccgccccaggtcccctcccacctgcagatgctgtcttcttggccttttcccacggtctgtctcatcctctcatctccctggtacctccttcctcacctcgccgaccccacacagcagcatagacgcccacccttcttactcttaaccccatttcttatcgttgctctctcctcccccagcatggaccccaatttcttctctcctaatttctgtcctcatcatccaccattataatattaagtctcatccattctccctgaacacctgcccttgctgtcaccatcattttttggacactgtcaccactccccacttcccaggagctaaccctggcttggatcccttgtgaagtgccaggaatgggtagggtcaaccctaaggcccctcctcttctccccattgtactcaccccttcctgcacccccagaactcagaagagcaaaacagccagttccagagcctggagcaggtgaagcggcgcccagcccacctcatggccctcctgcagcacgtggccctgcagtttgagccaggacccctggtgagggcagggctgggtgggcacagggaggggtggggctgggacaggcacagcttttagcgaattaaaccagcgagctagtgcctggagggtctggaaaagcagatctagaacacagagagccagatctagaaagagagaatgctttagacaagagccagaaagcatgccacgtgacctcaacaggcttacaagtgcccagggtagatctcagtgcgcagcgggcagggtacacacgtcaggaccccgcggagccacagagagtccagcagcctggcagaaaccacatcccatcccactctgtgcctgtggcagcgcccccatcagcctgtggcagcacctttccgtgaactctaggggaccaaattcttctctccaaagcctttttggcagatgccagcacgcagtcattcacggttgatggttgggaaaaagaagctgttagccatcccaggtctagggagcacagcaggccctgatctggaaacaagaaaaccaccacacacagctcacaaggcagaccacacaattgtggatccagaagcctccggatgaggcagaagatacctgggagatgtggatggacaaccgtgccatccagaaacacccgcagagtctagaaaacccagcaggtgatttagaaagggagaggccacagtgctggctggcaggggatctgtagacaagggtctcatcccaagaagaccccgtccagcccagcacaggataggaggacagcctggggacagccagggcactgcaccatgtggacatgcatagtggacccctccagaaaacaaggaaaccgatagagtggggagaagtgcccgaggcatgcagaaagaagaacatgtcagctgcaagaccagaggctggtcatccggacgccaaaccatcagatatgcagaaaattaggaaattgcagtctttcccctgtctacattctctttccagaagagtggttcccccgacaaccacatgcacggagactctggccctctgagcaagggagtcccctattcaagccttggggtttctagaacaccagattgtggacatcagcccagggatcgtgctgactaccatgttcttttacagatgtggaaaccgaggcctagagagggtcagggacttgcctgaggtgaccccggcggcctctgggcattttgaggtttattctcgcatagctccctcacctcatcagcttgtggggagccgatcagagatagctgtggtcccctgggcagcttcctgttggcctgtcttagaattttgctatatttggggggtgtgaagagtggatatagatgtgttaaaactgtttaaagtggagaaggaggaccgggcctggtggttcatgactgtagtcccaacgctttgggaggctgaggcaggaggatagcttgagcctgggaggttgaggctgcagtgattgcaccactgcactccagcctgggcgacaagagtgaaaccctgtcttgaaaaaaaaaaaaaagtggggccgggcatggtggctcacacctataatcccagaactttggaggctgaggtgggtagatcacttgagatcaagagttcgagaccagcgtggccaacatggtaaaaccccgtctctactaaaaatatgaaaattggccaggcgcagtgactcacgcatataatcccagcactttgggaggctgaggcaggtggatcacccgacgtcaggagttcaagaccagcctggccaacatggtgaaatcccatctctactaaaatagaaaaattagccaggcacagtggtacacacctgtaattccagctactcgggaggctgaggcaggagactcacttgaacctgggaggtggtggttgcaatgagccgagattgcaccattgcactccagcctaggcggaaaaaaaaaaaaaaaattagccaggcctggtggtaggcacctgtaatccaagctactccagaggctgaggcaggagaatcgcttgaacccaggaggaggttgcagtgagccgagatcacgccactgcactccagcctgggtgacagagcgagactccatctcaaaaaagaaaaaggagaaaaagtcccactcccattggagtgagttcatttcccagatgagagcccccaggagccaggacaggttggagtccccactgtcacccagaacaggggcgggcactcaggaaatgcttgacgaatgacagagtgagccccacttgtccacctgttctttccaagccctcagtatgcacaaggcaccaccatctgggacacagatggatcaacctacaacacccctcaacacacacaaacccttaagctgctcacagtctttccaggcagtggagtgtagtagagacaggctgcctggattcgaatcctaactttgccacttagtagctatgtgattttgggttttatttatttatttatttatgaaacagtctcgctctgtgtcacccaggctggagtgcagtggcacaatctccactcactgcaacctccatctcctgggttcaagcagttctccctgcctcagcctcccgagtagctgggatcacaggtgcccaccaccacacccgactaatttttttatttttagtagagacagggtttcgccatgttggcctggccggtcacaaattcctgacctcatgtgatccacctgccttggcctcccaaagtgctgggattacaggtgtgagccactgtgcctagcctagttgtgcgactaagcttgactaaacttcttgagctccgttttctcatctgtaaaatggggataatgacggtccctatgattgaacacgttaatgcatgtagagggtgtagagccgtgtctggtatacactaagccgtcagtatagacagtagtagtagttgttgtcattattgccgggaggagaccatgatgaagaaccacaaaggaccatagcacaggatggaaaattagaaaatgctcatggcagccccagggagcctgcaggggaacccagggcctggctttaggggtggaggtcagggagtgcttcccagaggaagtggcagttgagtcccacagccataggatggccaggaggtgaggaaggcccttttcaaagggagagtgtggtttgaggcagggtgagggagcggagagtcatgctgtgtgtctcccccagctttgctgtctgcatgccgacatgctgggctcactgggccccaaggaggccaagaaggccttcctggacttctaccacagcttcctggagaagacagcggtgagagaccttcaagctgccccaaccctgcaatccctgtttgggcctgcagagtcaccatgcggtccccagcctctgccctgagggcagctgctgacccaggccttccccagcaccctcgcttagaccagggttcctggcagtcctcccggcctgcatctcagcacaccaagtcctcctcttcaccccattctctctcttgagcaggttctccgggtgccggtccctcccaacgtcgcctttgaacttggtaaggagaaggatgggatgagggagaggtgtctagcggggaccacacctcccaggaggccaaggggagggaggccgcactcccatgctctgctcggacagccgagattcattcattccttcttggcagcggcctcaggacgtgtggctgttggagtccaagggtgggtggggaccgtggtccaagccaccagggagctggaccctagcccccatgtgtgtccctgcagaccgcactagggctgacctcatctccgaggatgtccagcggcggttcgtgcaggaggtggtgcaaagccagcaggtagccgtgggccggcagctggaggacttccgttccaagcggctcatgggcatgacgccctgggagcaggagctggcccagctggaggcttgggttgggcgggaccgagccagctacgaggcccgggagcggcacgtggcggagcggctgctcatgcacctggaggagatgcagtgagtaggccagccctggtgggagcgtcgcccctccccagcacaagggcacccgtgctacctctggcatgttccatcccgtttgcaggttccctcttcagggtcagagttcatttcttggcactgggggtcttcctctaccctggtgttttaactcaccttgaatccgagtcttccctttccagctttggggttcccttgtcatttctgggtcttgtccatgatctggcacttggatcccatcctcctggatgagagacctccctccctcttatgacagtccttcccaatcccttccacagtgtcccctctctgtctctcttccccctgcctatcccaggacagcaaccctgagatgtatcctgggtggatggggaccccaggcctagcaaatatgtcacaaacatctctcttcctcctacagacataccatctctaccgacgaagaaaagaggtgaggggggcaggggaggcgtgcggcctcctgggtttgagggaggagggggctgagggcctggactcctgggtctgagggaggaggaggctggggggcctggacgcctgggtctgagggaggagggggctggggggcctagacgcctgggtctgagggaggagggggctggggggcctggacgcctgggtctgagggaggagggggctggggggcctggacgcctgggtctgagggaggagggggctggggtcctggacgcctgggtctgagggaggagggggctgggggcctggacgcctgggtctgagggaggagggggctgggggcctggactcctgggtctgagggaggaggaggctgggggcctggactcctgggtctgagggaggaaggggctggggggcctggacgtctgggtctgagggaggagggggctggggggcctggacgcctgggtctgagggaggagggggctggggggtctggactcctgggtctgagggaggagggggctgggggcctggactcctgggtctgagggaggaaggggctgggggcctggactcctgggtctgagggaggagggggctgggggcctggactcctgggtctgagggaggagggggctgggggcctggactcctgggtctgagggaggaggagcctggggcctggacacttgggtcctgggcattgggtaacagcccttgcccctgtccttttgaaccctctcatctctcctcagagtctcacaggaagtagttgtggggtcaggatgggaaggccgggcctctgcctctagggggagagagagagagtgtgtgtgtgagtgtgtgtgtgtgtgtgtgtgtgtgtgtgtgtctttgtgtgtgttgagccctcactgtcccttccctacagtgctgccgtggtcaacgccattggcctgtacatgcgccaccttggggtgcggaccaagagtggagacaagaagtcggggaggaacttcttccggaaaaaggtgcttccctcagtgccccgtcctgaccctttcctctccagagacgccctgggagcctcatgactctggatacctagcgtcaaattctgctttgttgttgtctcagagatgcttagcctggtcttcctccccgccctctcacaggtgatggggaaccggcggtcggacgagcctgccaagaccaagaaggggctgagcagcatcctggatgccgcccgctggaaccggggagagccccagggtaaggcggctctggcctctgccctcccctgtcttccccagctgctcccactcactgtctcattctctctcgtttcagttccagattttcgacacctcaaagcagaggttgatggtaatgtacctgtagccatagcatccatactgggggcctgtgtgggagaggctaggacctggacgcctgggtctgagggaggaggggctgggacctggacgcctggttctgagggaggaggggatgggggcctggacacctgggtctgagggaggaggggctgggggagctcctgggtctgagggaggaagggctgggcctggacccctgggtctgagggaggagggactgggcctggacccctggctctgagggaggaggggctgggggagctcctgggtctgagggagggaggcctggggcctggacccctgggtccgaggtaggagggattgggcctggacccctgggtctgagggaggagcggctcagactcggactcttaggtctgaggaggaagggctgggcctagacccctgggtctgagggaggaggggctgggggagttcctgggtctgagggaggaaggcctggggcctggacctctgggtctgagggaggaggggctgggggcctggactcctgtgtctgagggaggaggggttgagggctcctgggtctgagggaggaaggggctccttgtcatggtggggaagggcctgagcacagcctcttgcatcccctggcggttgtggatttgagttactgttctcttatctccctctttctccctcactgtctccccagccgagaagccaggtgctacagaccggaagggaggcgtggggatgccctctcgggaccggaatatcggggctcctgggcaggacacccctggagtctctctgcaccctctgtccctggacagcccagaccgggaaccaggtgagagtttcctgggccagggctccatgaggcccggcgatccagggtgggggtgctgcctgcccccttggcacccccagatagaagccattccccagcaacacctcccctttgctctcagcatccacttctccctgctcctggtcaccactgtcattcataactttccccttccctcagtttgccctttccacagctttgctcccaggctctgacctctctgctggtgctgcgtctcccacccccttggactacgttttccatcaacccttccttttccagaaccttccctgagtacatgaccagtccaccctctgagctgcattgctggccccctaggtggggagcccgccagccccatgagcttcatccctcaccatccttacactgctgtggcctcaggcccttggatctctgcatggccaggccagggctcacacaccagctctgctgactgcttgtgtttatttagtatcttggatatgactcccctttcttagcctccgtttgcttttctctaaaggagtatgagagggtggggaggatgaatggacgtggaggcagcacagaatccagggccctcccgacctcagggggctgcagtctggttgggtgggagagatgtttgtgacctatttgctaggcctggggtccccatccacccaggacacacaggggcacccacttctgttgcatcttcatgctcctgcccctagtggccatgttctgagaggtcttaacatctgtccgtcccgtgctgaagtacagagcagccatgtggtgtctgccaggcactgggtagctttagcccccgcaattccaggcccccagagtgtgggtctcgtggccgcagaggccttccagccagccctgctccctccaccccacaggtgctgacgcccccctggagctgggggactcatccccgcagggcccaatgagcctggagtccttggcgcccccagagagtaccgacgagggggccgaaaccgagaggtgcccaggctggggtgcaggggcgggaggtgtggcttactgggcgctggtgggtgggtgcagggtcaccgctgccatctgtgcctgcctgtcccaggctcttgctccccatgctcctctgctgctctctgggtctggccattcctctcccttcttctttccttttctcatctccctcctgcttcctcattgcccccctttccttttatccttcctttttcctctgctccttcctctccttccttttttcactaatccttctcctcctcccttcctctccaccactccttccatctcctttatttccccctcctctctcacctcccctctcctctctcacctcccccatcctctctcacctcccccctcctctctcacctaccccctcctctcacctccccgctcctctctcacctcccctctcttctctcacctccctcttcctctctcacctcccccctcctctctcaccttccccctcctctctttcctccccactcctctctcacctgggttttctttccccaccttccatccccctccgatctccctgccacttttcattttttcagcccttcctccccttctctttcaagcccccctgccccctgccccccaccccccgcctcgctcctgcctcctggtgcccgtccctcaaccccccacccctctgctctgtgccctgggggccctgtcccccttacagctggggggcaggctctgcctcctgcccgtccttgtgccgctgctttggggaccctttggtgggtgcggggaggtgggtcaggttccatctgggcccacctctgaccctgtgcccctctctccccagaaggtggaagaggtgggtgcctgggccctgggtgggggaagggctagcccctcccccatttctcccagcccctcccctctccccatggccactccctccccttcactccctgtgaggggtgggtggggacatcaccctcccagttgaagagctaagtatggaaatcctccccaccccataacaccccctctgttgccatccccctgcctcagggaagggagggggtcagtcctatgctccatcctgggttccccatcccttcccccatcaaatttcagtatcccccctcccccaagaccccccactaccccagtgcccctaaaatcccaccactcctctgactctctcctctcttctgttgcatgtttgatccctgtcctggtcacccttgccccggtcctggtctctccctgtctctgtccctgtcctggtctctccccgtctctgtccctgtcctcgtctctccccaatttctgtccctgccctggcctctccccacctctgtccctgccctggtctctccccgtctctgtccctgtcctggtttctcttcgtctctgttcttgtcttggtctctccttgtctctgtccccggcatctgcctgactctgtccttggcctcggggtccaggctatcagggcgtctggggcgctcagagagcctgcgggtgagtgaccgccgccggccttcccggggcagcctcggggctaagggccggggtgggggccgctcccggagcgacgtggacatggaccccagttccgccacggcagtgcttggccctgcccgacgagccacgtatgtcaaccctctcccttcccccatccactaaggcagcctggagaatcagggagggattgttgtcagagtcacagaggaatgggcgttggagaccgaggtcattgaggccaactgtggtcacagaccttggaggaggagggggtagaatgcttctagagatctgggaactctagtgtggtccgatctagagacctggtctgctgcacgggccaccctgcgggcatcgaatgccaaggccactgaccggggttgaacgctctaagaggctgaaggctgcttcttgggatggcccaagctggggccctaacaaggcctctgtccacagccccgagcctggagatgagggggagccggggcggtcgggactggagcttgaaccagaagagcctcccggctggcgggaactcgtccccccagacaccctgcacagcctgcccaagagccaggtgaagcggcaggaggtcatcagcggtgagtactgcccccatcaccccactgtggccaaggacacagtccagctctggcaaaggcaaagacaggcgcagagagatgttcatcttggtgtcatttaccatcgggagaacttgaaggcagcttcaaattccctcttgttccaagttcagattgtttcaacacagagcattttgatggaatgtgaatgccactgtggaagggacatttccaaacatttctagtagtgcaatacagtgctgatgttgagaacactgcatttctggtgcaagcttttatttccttgcttgtgaaatgtgggcattaatagttcctacctcagatattgtcatgaagatgagatgatttgtgtgaaatgtttagcatagtgctgggcacagaggaagagcattttattttatttatttttttaaatttttatttgaggcagagtctcagttggtctctcaggctggagtgcagtggcacaatcacggctcactgcagccttaccctcccaggctcaactgatcctcccacctcagcctcccgagtagctgaacaggcatgtaccaccatgcctggctaatttttgtattctttgtagagatggggtttcgccatgttggccaggctggtctcgaacccttgggctcaagtgatcctcctacctcagcctcccaaagtcttgggattacaagtgtgagccaccaggcccagtcaaggaagagcattttaatgagattgttgttactagtttgatcttaattgcttaggggagaaaagatccccacaggggaaagtttgggagaatgatcagtatattagcagtgcttgcttctgcgtggagagatgatgagtgtatcatttttgtctttttccttttttcctttgctaattgtgtggtggctagggaggctggtggcaaaaagagaaagctttttttttttttttttttttaagacagagttttgctcttgttgcccaggctggagtgcaatggcacaatctcggctcaccacaacctacgcctcccaggttcaagtgattctcctgcctcagcctcctgagtagctgggattacaggcatgtgccaccacgcccggctaattttgtatttttagtagagacggggtttctccatgttggtcaggctggtctcgaacgcccgcctcagcctcccaaagtgctgggattacaggcgtgagccactgtgcctagcccaagagaaaggtttgggacttgactgaaagcttatttacagattacttcatagtgaaaaagatacttattcaaaaattttaggggagtagttgagtactttttgggtcacagatccttctaaggacatgataaaaaaaaaaaaaaacatgagccatgtgctacccattaggactttctggaagatggaaatgtgctttatttgtactgctcaccatggggaccatcggccacctatggctggtgagcacttgaaatgcactaggccaggcacagtggctcatgcctgtgatcccagcactttgggaagccgaggtgggcagatcacttgaggtcaggagttcgagactagcctggccaacatggtgaaaccccatctctactaaacatacaaaaattagccaagcatagtggcgcatgcctgtaatcccagatactcgagagagtaagccaggagaattgcttgaacccaggaagcaggagatggaggttgcaatgaacccagatcactccaccacacttcaatctaggtgacagagcaagactgtgtctcaaaaaaaaagcactaaatacaactgagcactgacttaaaatttcattgcaattaacgaaaatgtaaagagttgtacacggctggtgactatcacgttggacaggatagcaatttctttccccagaaagaatatgcataatgtacaaaatcgtgcttttagtctcaggggacttctagggcccctgaaactcacacatatgccctccggggatgtgggggtccctggatctgaggctgtcaaccactgtataatgtggcttgatggttagacactaaacacagctgcaagcttgctggcaggtgggatgactagcttgtccccatttgctcaggatattcacagttttatcactgaaagcccaggcaggcaaatgaggaccattggtcactctggccagctgccacagcgaaaagggaaaggcagtgggttgaggaatcctcactggttttttttttttttttttttttttgagacgatctcgctctgtcgcctaggctagagtgcagtggcgtgatctccgctcactgcaacctccacctcccaggttcaagcgattgtcctgcctcagcctcccaagtagctggaactacaggtgcccaccaccactcctggctaatttttgtatttttagtagagatggggtttcaccatgttggccaggatggtcttgatctcttgacctcgtgatctgcccgcctaagcctcccaaattgctgggattacaggcatgagccactgcacccggcccctcagtggctatttaagagggcaaatgactccacccggagagtttttttttttatttgtttgttttgttttgtttttttgagacggagtctcgttctgtcaccaggctggagtgcagtggtgtgatctcagctcactgcaacctctgtctcccgggttcaagagattctcctgcctcagcctcccgagtagctgggactacaagagtccgcccccacacctggctaatttttgtatttttttagtagagatggggtttcaccatgttggccaggctggtcttgaactcctgaccttgtgatccacctgcctcagcctcccaaaatgctgggattataggcatgagccactgtgcccagccattttgttttgagacaaggtctcgctctgttgcttgagctggggtgcagtaatgccatcatagctcactgcagcctcaacctcctgggctcaagggatcctcccacttgagcctcccaagtagctgggactacaggcacacaccaacatgcctgggctaattttttttcttttttaaatttttggtagaaacagggtttcaccatgttgcccaggctgatcttggactcctgggttcaagcaatcctcttgccttggcctcccaaagtgctgggattacaagtgtgaaccaccatggctagccagagagagttttttcccaccaacttctaggaagctttcctccctgctctgcctcattcctctagcctgcccatgaggtcatgccccctagtctgcaccctccccaacatgcttcctgctttggtggccctgcagagctgctggtgacagaggcggcccacgtgcgcatgctgcgggtgctgcacgacctcttcttccagcccatggcagaatgcctgttcttccccttggaggagctgcagaacatcttccccagcctggacgagctcatcgaggtgcattgtgagtgcagagccagggtccctctgtgtaccccactgccccacgggcagctctgctctagccctgggttcaacctgctcgggaaccccagggttcacatggggtgggggcagatacgccatccggtcccgaggatcagacacagacacacctgcagccctacccccaccacaccgcagcaggccccgcacagcatcttccagaccctggtggagcatccctttcctcctgcccccacagccctgttcctcgatcgcctgatgaagcggaggcaggagagtggctacctcatcgaggagatcggagacgtgctgctggcccgggtgagatgcccagccctcccgctcctcccagctagacacatggaattcaggcccgggacgggtcctgagcccaccctactccagtcccagggtctgggcttccagcctgtcgtactttagtccctgttcttgcccatccccactgagacacctgcctggcctgaatctcgctgtagtttgatggtgctgagggctcctggttccagaaaatctcctcccgcttctgcagccgccagtcatttgccttagagcagctcaaagccaagcaacgcaaggaccctcggttctgtgccttcgtgcaggtgaggtggggtctggactccagcttcccagggaggaggggcctggagacccagactcctaggtgcctgcgccctggggtgagcccaaagcctgggccatcgcaacaccagcatgtttcccgcaggaagctgagagccgcccgcggtgccgccgcctgcagctgaaggacatgatccccacggagatgcagcggctgaccaagtaccccctgctcctgcagagcatcgggcagaacacaggtaccgcgggcctggatctctgggcctcggctctcctcttttttttttacattttttttctcactcattttcatcagtgataccatcacagctcactgcagcctcaacctcccaggatctaccatcctcccacctcagctccccaagtagctgggaccccaagggcacaccaccatgcccagctaatttttttagtttttttttttagagacggggtctcgccatgttgcccaggctggctttgaactcctggtctcaagctatcctcccgcctcagcctcccaaagtgcttggattacaggcgtgagccaccatgcccggccagctgtcctttgtctaaccttggctgcccaatctggagcctccagggcaggggttcaccagagctgctctctcccttgcctgcagaagagcccacagaacgggagaaagtggagctggcagccgagtgctgccgggaaattctacaccacgtcaaccaagccgtgcgtgacatggaggacctgctggtgagcctgggctggccccacacccgggacagtggatggtgtgagagcagggggtggaccctacctcagcctgtccagaagtcacaccccaccccttggcttgtctccctcaagggtcactgtgtccaggggttggcttggccctcagcatctccctctcagggtcattggaggtcaggcccaaccctcagcttgcccgcatcagaagttggtcttggctctcatcttaccaatgtgggtcactgcaggtcagccccagcacttagcttgtccccataatgctcccgtctctgccccagaggctcaaggactatcagcggcgcctggacttgtcccaccttcggcagagcagcgaccctatgctgagcgagttcaaggtgtgaccataccctcctgcctcccccgcccccctactccttggcccaggggattctgtgatacagcccccagcctgtcctgcccatcccataatacacccaggaagcgagagctctgtcccccacctcatgccaatcccatgatccccagcctgtggtcatccccggccactgccctgcccttcccctccccaccaaccccaatcaccccctgccaacctgcacaaaccatcaccccctcctgccccagaacctggacatcaccaagaagaaattggtccacgagggcccactgacgtggcgggtgactaaggacaaggcagtgggtgagtgccagagcagctgcctagtgcagggtgttggggcagtgagccaagggcggggagggggtcgcgcgggggcacgccgtgtgagcactgctcgccccgtagaggtgcatgtgctgctgctggacgacctgctgctgctgctccagcgccaggacgagcggctgctgctcaagtcccatagccggacactgacgcccacgcccgatggcaagaccatgctgcggcccgtgctgcggctcacctccgccatgacccgcgaggtggccaccggtgagtgcagccactgcatggcccagggcagagggtgtcttttttgggcagagctgcctgtggagtggggagcagaaccctctagagagccagggagccagcattctagcaaagaggttgagaagtaggtggaggtgggcagggcggggccaggcctagagggtttataagtgaggtaggaactgctgcaggtgtttgcacagaggcgtgtcttgtgtaaacaaggagaagaaaggccaggagtccagtgaggagggatttgtaaacatactactaggaagttgcaccagggccacaaacactggaagcggctggagggtgggagtggctggaggggtttcgttaggtaagccagggtacatgcccgattccataaggaggtgtgagaggtggggctcaggaggacacatcgggccctggatattagcagacagtgagtggtgagttgagccatgggagccctgagagcgccaccactgtgggtgacttctccagcttgtgcttagggaggggcaggcactggggggacctgggctctgagccccatctccccctctccctgcagatcacaaagccttctacgtcctttttacctgggaccaggaggcccagatatacgagctggtggcacagactgtgtcggagcggaaaaagtgagggggggtctgagttctgagtgtgggtggaggacgcccaggtttctgggttcccagggacaggagggctgtggggaggccctggcatagggtctgggggctctgactgcccagggatttggcctttctccccagctggtgtgctctcatcactgagactgccggatccctgaaagtccctgcccctgcctctcgccctaagccccggcccagcccgagcaggtgaggggggccatggagagagctggaggttcagggagtggggccggaaggcggggcaggcttccctccacaactccagaaccgtctctgtgtgagcatgcacatgtgtgaatgcatgtgtgtgcatacatgtgtgtctgtacgcaagtatgtgactgtgcgtgcatatatagtgtgtgtatgcatgcatgtgtgcgtgtgcatgtgtgtgcgtgtatggtgtgtgtgtatgcatatgtgtgcatgcgtgtgacagcatgtgcatgcatgtgtgtgtgtgtgcgcatgtgccgaccccaccactgccccgtctgtctcctgtctccaggcctctgtgtcttccattgtctgggcctctctgtctccctgtctcccggcctcgacctctgtctctgtctccggacctccctgcctccccacctccagctctctgtctccctgcccctgcggccccccagggccaggggtgtggggtcacccagcacttcctcccctcagcacccgagaacccctcctcagcagctctgagaacggcaatggtggccgagagacgtctccagctgatggtgagaccagagggatgctgggtgaggggccaggttggggctgccgggtgaagagaggcatccacaggaggcccggcaggatctgagctccctctctgttccccaatccagcccggaccgagagaatcctcagtgacctcctgcccttctgcagaccaggccccgagggccagctcgctgccacggcccttcggaaaggtagcccagctctgcccctccagggtggccaccagcccaaacagtgcctctgttccaactagaacaaggctctccacgtcaaaaatttccttacgcccagctgccagaaaacaaatgctccaaacccacccagcctgcaccactgtcctgggtgcccacgtccctcttctgcagccaccatcccttgcttgattctatatttagcctcttcctgaacacatctctgtcttcagtaccttcctgccctgtcccaaccctaaacccagcctcacttcttcacctccctttggatccccgaaccccatctgctcagccttgcctggcacccaccttcacctccagcccctacacatcccctttggaatcccccatcccagatcccagcccagccccctggtctcctgactccacccctccttgcccctggccagtgctgtccctgaagcagcttctgtttccggcggaggaagacaatggggcggggcctcctcgagatggggatggggtcccagggggcggccccctgagcccagcacggacccaggaaatccaggagaacctgctcagcttggaggagaccatgaagcagctggaggtggggcgggacgggccaggggtgccctgagtgggctggggaaggaaggggcccccctcatccatgacccccaccccaccaggagttggaggaggaattttgccgcctgagacccctcctgtctcagcttggggggaactctgtcccccagcctggctgcacttgaggttcccgcccaggaaggtgagtggggcacctgggggccagggcgctgtcctgaaaggagggtccccctccagagctcgcatccctacagccccttctgtccatctccctctttgtcttttctgaatctccccactccacctcgtgtttctcatctctgtgtctctgtttctgataatctgtttctctgtctctgtgcccgcctgcctctccccacctccccttctctctctgctctccctgtcttgtctctgtgtctgtctctccctgtctctctctccatctctccccgtctcccctcttctcctacatcccccaggccttttgcaagaaggagaggaatgggggagaggacgtgagggaccacccccacccacacagctgccgcagcatctcacaccccgagggcctgaggagagggagctgtgggccacgcctgggaggggcccagctggggttactggccccgcatgagcctcggccatctctccctcctgccctctgcttgggggactcagggctccattctggagggcaccacggtgacccgggccatctcagtattgcctgtgggggccacccctccacccccacccccaagtgccttcgctctgtttttataccctgaattggaggtttattttttaatatatattatctaagaagagatctgtgtgtgtgatggcggggtggggcctggcatggcgtctggaactctctgtgactgtctggcgttgacatcctgggtctgtgcctctgcgcctccctccagttgttcattcattcattcattcatttctttgtttgaaccgttactccccaggcactccgtacacacactgggtatgaggcgtctccctgacaccgccctccagctcccacccccgatcccccatgctcagcactgggcaccccgagtctcactctctgttcttttatttctgtagtaaactctctggaggtgactgttgggatcatggggagctggtggggaggggggcccctcctgggtgggggctgggggcggggttattgctctgagctccctgtccccaggggggcctatatggggggggtgtcaggactggggccagcacagggggtttggagacacggccacacaaacacttggggcatagcacaggggtgggcgggcggggcaggctgggcgccatattgcactttgggagtggggccaggcggggacccccctcaaactggagcctggggaggaggccggaggccatcacattccctctgtcctctgtggagggggaagtgagaccccccccactctggggctggggaaggagactggggcagcaatgtgcccagacctgggaggtgctgagggctggtcctgggccttgggccaggcatcaagggcagacgggcagccaccctggtccctgcctcagcagaatccattgccccctgccggctcagctgccggtcccccctttgcccgcctttgccttggggggtgccgggagaccctcatcgccctcgctgtcagagctgcagccgctgacgtcggtgatctccagctccgagtcgctgtcctccttcccaccaagggcagcctctggacccccagcccctggcagcgccaggcgaggggccgctgccaggcccgaggggcgctcggggcccaggccctcccctgtcgaggccagcaggggcgtggctgtggggcctccccctgcccctgacgagggcaggtggcccagggaactggccagagggttggggtagaaatgcggggggtagagagagggaggcagcttggggaaggggcccgtgaggtacgggttaaagttccaggggtactcagggaaggcgcggccataaggacccagcaggccagggggcttggaatagctggtggcacctggggggcacaggggtaggtcaggctggggcacctgcctgcctggggaccagtaaagggggctgcctccctgccatatcccaccccatctccccgcatccctcctacatggcatcttaccccctcatacagcttcccccaactccatctcctcccactcccccacttgtcttcccattccttaggcacccctgaaagcccctgtctccctcatttcccctccctcacatcacatccttttctgggttttacacacacacaccctacaacctggccctgggcccccttccccatctcttctcttgtcttttctcatcctcttccctcaagcctgcagcttctcccactgtgcccccagcaccccagaacctccaggctcttaccagagcccaggaatgggaaagggctgtccagacgcaatttatctgtctcggaggtgaacaggggtgtccgggcccctggctctcccaggcgtggggcagagaacagggtttgcagggtctagagagggagtgggagaagccgcccttctcagactgtcccctccccagagtgggcaccaagtgcctcggttccaggaccccagtacccagactcacctcaggggtgaggggaggagcatctggccctggggcccccccaaagggactgggggtcagcaagagtggggagccagtggcagctgccgccatgtccagcagcgggtaattgacaagcacgactttgctgaagttgaacttgtaggtgaacctcttccctttggtcttgtggagaatccgcttgttgtagtagtaactgtggggagagtggtggtgttggggaggtgcagggggagccctggggcgggatctggggtttcttaatgcgtgtgctgtcccaggcatggtgcacagagcactagaacttggggaaactgaggctcacagaagtcccttaatagggatcacagggcaaggaagggatgaggcaggagcggggaccctgccctgcaagactccaaagcccaggtttaggggtccctcctcctcgcctcccttccactcacaagtagcgatggtggctactcacgcacagccctgtgccttgtgggatccagcaggaacctgccccaggatgcagagggggcaccagagggacagttgggggaaaaggacaaggtgggatccagccccaagcccttcctcaccgcagggcccggctcagcttgtcgtaattcatgtggggcttgcatttgcgaataccccacagccgggccacctcatcggggtctttgatgacgaattccccgtagtccccctgccaggctatgacgccctggtactcctccttctgcagcagctccaggataaagtgccacagctggatctgcctcgagccaggggatgactctggcttgtaggcccaatccgggaaggcaaaccctggggacgggaggcagggagtggcctggggtcaggatgccaagtccagggctctgggtcctgctggactcagtaacctgggaggcatgtagttctcctccagtctcaggcatctttagggacctggtttccacactccaaacctcctccctttgtgtctggtccccaaattacccaaataagggcaagaacccagtcatccagggaccctgggttggtaccagtctgatcccctaccttggcatagctcccccaggctcagcatccagaggtggagttgggagggactggcttcctgcacccatgacagtgaggaggaatggggaggggcacccgcctccaacagcgttagtcctctcactgcccccagccagccctaggaggtctctagtctcttgtaccctgcggtgccctcagctcttactgtctctgttccccattccctgtcccctgctccacctttcgacattccccagagccccccactgacccatcctggcatatccaggctgcagctctgtgcatgtctgtacctgcctgtgtatttgtacctttcccgtccctgtgtcccctccaccccatatccatgcccatgtccgtccaagagcagtccagaacgatgtgtgtgtgtgcgtggacacacacatgcccacggaagacatgtcacacagacatcagttcacttgcctgagacacacagccacactgggacacaggcacaccggagtgccacactcatgctgggggccaccaaggctgacatggcagacacaggctgcgcaagactcaaggtcacgtcatctcaacaaccccacagtgcacacccatcacaacacagaattacacatctcaagactgggacttactaacaacacaaatgcctgacaagacacacacaggaccccaaatgcccaaagaacacactgtacgatggagacggtgaacacagcaccaagatatccatgtccccagacacacagggtgacagcatgtcagtagagcaacttcccaaacctgcacacagaggcacccacatgtcagcactgacacccccggctcactcagcatcacgtctcacatgcagaggggagtactccactgtccacatacccccaggagctgggcaccccgaaatctcatctcccatgcagaaggccccaagccctgggtccaacttctgtgttcactcttatgccacatcctctgtccccttccccctcctcagagaccccagacccaggcatgaaaatagaaggcagagtgagtccataaaaagctggcagcagtgcaggagagaggagactgctgtgcgccagggcaggggagaccagcatcgccgtgtccacttgctgtgtgattacgggcaggtccttaccctctctggtttagaactgcacaggtggaaggcaagggggcgcagggtcccacccaggctgcctggtgtagaaaagtgggtgcttgtgcctcccggcctgaaggccggggagctccaggcagtctccttgagggagaatttttatctccattcatttttgggtctttctcacctcccatgacagggctggatccagactccagctctgacccattccacacccagaacacatcctactggggaggcaactgtatcacagacacacccacaggaccccaaggtgacaagaggacacccaacccgatactccatctgtcctcaaatgcacaccctcaaatatgttgtacctatgaggcacaggcacagctagagagaggacccccaaactcagtaggcagacacacacatgtgacagacaaacccccagaattcactcatgtgcacatggaccctacgctgaaaaccagacacagcccccaacacagaggcccagggatgcatcccccccacagccccaaatgcaccaagacagccatgcggaacgccacacaacccgagacagaccgcaagaaacaggcaaaggctcctcaccccactcaggcagaggcacagtcggagagctggcagacgcccccatcccaaaatgcggacacgcccagcccagagacactcaagtagcctcagatgtgcacgtacaagcaaatacacaagctcacacaaagacaggctgtgcagacacattctcccagtgtgaccccttctagaaacactgaagtgtgacacagggacacactgaaatgagaccccaaataaccaaggacagagtctctgtctgtctctcacacacacacacacccctcccgctgcacatcagcatggtgtctgaccagcttcaccgtccaccaaccccggttgcaagctgtcctctttcctgggtctcggtctggccgggtcgtgcctgcacgtacccctgactgggcagtgccgtctgtctacctgtccatccgtgcctggcctagtgccccctccagcccagtccctgctctcttttccccgcaggtcctgcgtgggagcaggctgagacgtgcgtggcagggatgcccgggcctcgggcccctccgtcctcacccctcactcacttccgtaccctcccagaagacccacctatccccccagcacgcagggggcaggggaatctggctgcgaagtttttagccaagtttctcagaaggggtttgatttgggggactgaccaagactgagagagaaggacccacggactagagtgagacacgtggagacacggagagaagggggatgcggctcactggggaagcctgaggggtgggggaaggggtgggggaggtccgggccagttaccgggggtccagagagccggcagggcgggcggggcgaagagaaggtcggagacgcagctacagtccatggcggagccggccctgcagaggccgggagggacacacggggacggggtgggcaggagagacagacacaggtcagccagcggggcgctgcccggggccttcccctctcccaggtccccaccccagcctgacaccctctccccgcaatccctcctgcccactccctcccgcaggcaccgctctgtccccagccgttcccggccccgagaccccgttccttccctcccagcctctcctcccgcagcctcctcctcactcggtgcctccatcactaactacgccgctcccagcctccctccccgctccccgccactcgctcacgctctcacactcgctggctctcacgcccgcccgcccgcccgccgctcgcgccccgcaccgtctctgctgccgtctcccgtccccgctctcccgcctgacctcccgggtcggtcggtccctgcgtctctgggtctccctctgtctctctctctggctgccccagatttatcttgttctataacttgcccccacacccgccccacccggacgacccccaggcgggctcttccagcccaggcgcagccctgacccgcagccgcccaggacgggctgcaggggggcaggcccagcaccccctcctccagtcctctaccccacagggcagcccccagcgccctgcaggaggcctccacagaccctagacctgctgctcaccctgaagacccctgtcacttggatctgcctccctcctcagacaccccttcccctcacatctgcctcccctgtcagaccccctccctcagacactccctctccctagatatcttacgcccctaagatactccatcccctcctcactccagtctccccgcacctttccccctcttatggcgcctcccctccacacacacacccttgcaatccactccctctcacacccctccgcagacacacgctgccctcgcgctcccgagacccctcccctcaggcacttcagcccctcactgccaccctcacaccccacctctggagcaccttcttcctggagaccccccagacgctctcaaaaacccactcctcttagacaccctgatactccccactgctcccatgcgccccccagccagaaacccctcagaccctggcagcccacactgtgttcccccgtgagccccgcctacccctggacactggacaaaacttttcagacaccccatgtcccctcagactcgcccggtctccccacagaggccccaacctcagatgcccccacctcccatctgcctcctggagcctcccctgtcccaggccccctctgttcccacacctgtctccccgtctttctccatctgccccgtctcggtatctctccctctccatctctgtctctccggtcacttggtctcttctcccttccgtctccccccaccatctcccttccatttctgtctctctcctccaccaagggggtctctctccccacctcactgccctctccctctcgtctccatctcctcctccacccctcagtctcttccctgtttctccatctctcacccctgcttcttctccatctgtctctccatcttcccagtgtgtccatctctgtctccctatgactttctccccatctctgctatccgtctttccctccccttccaccatctctgtctccgtctctccctccctttccaccatctctgtctctccctccccttccaccatctctgtctctgtctctccctccctttccaccatctctgtctctccctccccttccaccatctctgtctctccctccccttccaccatctctgtctctccctccccttccaccatctctgtctctccctccccttccaccgtctctgtctctccctccccttccaccgtctctgtctctccctccccctccaccgtgtctccccccctttccaccgtctctgtctctccccccctccaccatctctgtctctccctcccctccatcatctctgtctctgtctctccctccccctccaccatctccgtctctgtctctccctcctcttccactatctctgtctctccctccctccccctccagcatctctgtctctcctgtctctgcccccaccgtgtccctgtcccgcgtctctccagcagccccgctcccccacacctctcccccacccatcgctctcccacctcccgctctctttgcctctcagggtccccctccttcctccccccgcccccaccccctattggcccctctcatttccgtgttggttttgatttctcttcccgacgctttcaactccccgccgcctcctccggacacgttataacgaggagccgtgggatcggcgctccgggccctgctcccacgctccccccgccgtgtctcacacgcgtctctgccatctcgcagtctctgtgcccagccttcgtcctgtgtcaggccccacagggacctggacccctcgcccttgcccatcgcctctgccgccctgtccccgtccgtctgtccgtccctcccatctctgggtctccatgcctccctgtctcttggttcccacgtcgtctccacttctgtgtccccacgtctctgtgtccccatgtctctgggtctccacatggctctgttttaatgtctagggtctccacacccctgtctccgtctccacatctccatatctcctcctcctcaagtccctgtcctgtccccatgtcccccatctctgtctcatctgtctctgtctccatgccccatctccctgtctctgtgtctctgtctccatgtctccatctccatgtctctatgtctctgtctctgtttctgtcccggtgtccgtctcttggggtccctttgatctcaccctgcccctggcgcccccctggccccattgatcgctgatcgactgatggagggagcgcggcctgcggggcctggggctgcagggccaaacagggcctggcaggacggccggacagatggacaaacggccccagccccagtggctgtggatggggagcagccacaatcccccacccccctcccccccgccggccggcgtggtgcggatgggtactccaggcaagctttaatttttaattttattttgcttcctccacccccccttcgccccccatctctaccgcccgcagccatggcaccgaatgtgtgtgcgcatgtgagcgaagcggtgtgcagaggcgctgggcaggcgagggccctcctcccttctctccctgccaagcacaaccacacagacccacacaccaacccaggcacgcacaccaccacgtcccacacagcacacatcgcacagatgcacacaccagcacagccacacacacaccatcacataccacacactgcatgagcccacatgtcaacaaagtcacacacagcaccacgtcccacacaacacatcacacacaccaacaaagcaacgcataccactgctgccacacacaacccacatcacacagatgcatgtgtcagtaaagtcacacaccaacactgtcacagtcacacacacacacatcagcatagtcacagatgcacagaaacagacacacagttttacacaaatacacacatgacacatcaattcaatctcacacagaaacaaagacacaaaatcacaaatcctagacacactgtgtaaacacataatcacacactgaggctcacaatcaaatacagaaacccagattcccaagcacacaatcgcacactgagacaacagcacacagaaacagacacacagtcacacaaccaagcaccaccgaccctcgagcgcatacatatgcacttggtcacgcatggagccgtagagatacacacaccagcaccaacccagacagccaacgcacacggccacacacacacccattcacagacacagtcacaatcacacacacacaccaagatcacggacccaaacatacgaccgacagcggcccctgcagaggtacacacagacacacccagacacactgggtaggggtgggcactcagagatgaccccaacccaaggcccctgccactcctgctcccaccatccccatctgtctgcctgtccctccatctgtgaacttcccaagcatgtctctgcatgggtgtgtgtgtgtgtgtgcacatatgtgacacgtgcccttgtctcagacctgcttctgtgactgcctctcgagacacaggtctctcggtctctctcagccccttcgggtgtcggcgcatctttctgtctgtctctgtcactgagggtctctgtctgtctctgtcagagagggtcttttctgctcatcttggcctgcctgtctttctaaatatctccatctctgagtgtctctgtttcccccatctctctctctgggtgcatctctctgtctctctctgtctctgtccctctctgtctctgagctctctgtcatctctctctgcctctgtctcctaacgccccatcaccacgcccccctgggctggggtttaaccagttgttttgatttctctaagctgcgccggccgcctcgggagccgcctcgggcctcgcacccccaccaccagccccttcatccctcacccaggcccccccatccccacctccccttaacacaatctgcacaatcggaatgaaaattgattttttttttaaatttcatatcttctccggggctctgtctaaagaggagagagacgcggcctaagacccttctgccaccgccgcccccgcatgcacacaccatgccccaaagcacacgcacgcacgcacacacacaccctgactgcacccacccatggccacacgttcaggcacaatctggggacatatctctccttacgccacacgcccatgtaggacacatctgtgcacacagtagagacccacagtgacacccactagtaggcacacacacaccatgcacagccccagccatgggacggctgccagccccacccatctgttgccacacaaacgagcccccaacaccctgtcccatctgggtgcacgaagccagctccccgcggtcacacactgtgtgtgtgtgtgctcacacacctgtccgtccagactatagccacgtccatgtgtacacagagcaggctcaggggccggccctcgacaggcaccaggagaccctgtgcctgtcttggagaggagggggttcaggggtgatgtggggtttcctgcatgggcatgcccccccatcccggacgccacccccattcccacactgcccacatcaaatgctctggcctgaccctggttgggggtgcctttgtgcctggggtgtacacataccccacatgtatacgccacatatacaccacacataccacatatacacaccacaaacacaccatacatacacacccccaccacacacatacccaccacatacaccacagacacacctagccccacacaccacatacacacacacggtacacaccacatacaccatacacacaccataccacacacaccacacatacaccacatacacataccatatcacacacaccacacacatatcacacacacacataaatacaccacacatgcaccacctacacaccacacacgcaccacgcacaccacacacacatcacacacacaccacacacatcacacacacaccatacactcaccatacacacacacatcactaaccctcacatacaccacacacagtacatacactacccatcacagacaaaccacacacaccacatcactaaccctcacatacaccacacacagtacatacactacccatcacagacacaccacacacaccacatatccgccacacaccacacacaccacgtacacaccacacaccaccccacacatacacacaccacatatacatctaccacacacataccacacactgcatacacaccatacacacacaccacatcactctcacatacgccacacatgctacactacccatcagacacaccacacaccacatatccacacacaccacatacactacccattacacacatacaccacacacacatgcacaccacatacactactcaccatacacacatgcacaccacacaccacacacacacacaccgcatatacaccacacacatcacatacacaccatgccacagacactatacatcacaccacatacacaacactgcatacacacacccacacacattacaccacaccacatgccacacataacacacataccacacacatcacccacataccacacaccacactcacacaccactcgcagcttactactctcaataccacaccttgtaatccccacatggacacacacaaaaccagtcatccttaacacacagacccacagaaaacacacagaagcacacagggtgacaccagaaacagcttcacacacagacttcggcacaagttcacagaagttgcagacacatgcgccatccaacagccacacataaacatgcaaccacacaaacatacacaatcaaacatacacaaacagtcatcagtgctctttagggctggacacacagtatcactcaattgttatgaaccaacactcaagctggtacattcagctcctacaaattaccacccacgtgtgcacgtgcacgcgtacacacacacacacacacacacacgtccacatctgaacccagactcagacacaagcccacaagctcagagacacaacagcaacccccgaacaccaacacagcgccacacaaacacacagctggtctgtgacacacaagattttgggggctcttcctcagctgcgtccttcacacccacactcaccagcccagctgccggggtcctctcagggtcgcactcacttggtccttccaccctgtttctctgggactgagcctcctcatcttgccctcagagataactgccccaggtccctgaggcctaccctgcacagccacaccatgtgaaaacaccagacatggcacaactccagagctttggacggtcacaccagacgcagctgagcaccacacacgtcacacagacatgacacgctcacagacatgatacgcccagacgtgacgaactcacagacatgacacgcccacagacgtgacacacccagacatgacgaactcacagacatgacgcgctcacagacatgatacgctcacagacatgacacacccagatgtgacacactcacagacatgacacgctcacagacatacactcacagacatgacacgctcacacatgcgctcacagacatgacacgcccagacatgatgcactcagacatgacacgctcacagacatgcgctcacagacatgacatgcccagacgtgacactcagacgtgacgtgctcagacgtgaggcacagacatgacatgctcacagacatgataacgctcacagacatgcgctcacagacatgacatgcccagacgtgacacactcagacgtgatgcactcagacgtgacgcacagacatgacatgttcacagacatgacatgcccagatgtgacacactcacagacatgacacactcacagacatgacacgctcacagacatgacacgcccagacatgatgaactcacagacgtgacacacagacatgacgcactcagacatgacacgctcacagacatgatgcactcacagacaggacacgcccagatgttacgcactcacagacgtgatgcactcacagacaggacatgtgtggctccactcagcacccatacttagtcacctgtgcccaggagcacgcatgtctacacagatcacattcacagacactgtgacacaagtcacacagtcatgtgcacatgcgcacacacacactcggtcttctgcctcgactgcactgtgcaggacacacagagggacagaatggcagacagggcagtggattcccaggctggggaaggtgtgtctgctaccctcgcttgagaggtggggaggctccaggccagagacagagaggcctgtgggtggggcaggggtggagacccacacccccctccctctgtctctccctctctgtctctgtctctgcctccggccctgtgtgtgtgtctctgcatctctgtctctctccctgagtctcagtctccgcacgatgtccctggggctgcggacagcagcgctccgaatggtgtcagttgaggggtggcgagggagcgtccccggggaggtgggagccgcagtgccacgcaccccgcctaccaaacagctctgggggaggggagagggagggtggaggcgccaccgtgaggcgaggcggagggaggtctggctgctccccaacctcactcgtggaccccgcctcccctcagagacccagagagatggaggaactggaggttggggtggggggcacagagaaggggagacatgcagggaggaagagagaccgagggggtggagcgtgatacatggagaactgagaggaagcaggagtgagacacggagggagatggagggggataggcgggacatggggaaccccaccaggggaaggcacagagaaggaaagagacacagaggacaaggacaggtcccacagaaacaggaagcagactgggagccacatgcacacgcagagagaagagagagacagagacagagagacaggcagggggagatccgaggtggggaaacacggcagaaggagcgaaccagagaggctgagacaaaagtagattagaaagctggaggtcacgggagagcgagggccgcaccggagaccctgggttgggaggaaggagagaagagggcagagatgcggaaaattgagggattagggcagaggcaggagagggatgcaggcgagcccggccctggaggtggagtggaaggctcaggtgtaggccgggtggcgggcagacctaaggtgtggattcctcgtcctccgccccacctcgcccttcttcagtcctaggaggttggtgtcccctgggagtccgacccatcccagcttcaaagcccaccctacccctcctcctcctcatctccaccaggccccaccccacccagaccccagctccatcctctacctctcctcctggtcctcatccccaactcccaccccttccccacccttgccttcattctacctccacccccagcctcactccacatcgggccccacccctctatcagagtgacagaaggcagggaaatgactgttatttggtgatgctggaggggcgggggcagagagctgaagcggggtgtggtgtacaccagaaccagctactcagggagcccagagacccagagtccttctagacggcaaccaccaagggccagggctcaggcatcccgacagagcccggggcttggcaccaagagtgtactgaggaaattatgttgaggtggaatccagattaaactgtgctcagcagggaatcagggagacagagatagcagatcaaagggacagaaagcaggagatcaagggacagaaatgaggagggcaaagagacagggtcagagggctggggaaatagggatggagccgagagctagaggggcagatggatgggactgagatgcgggagcacacagggacagggaatcggatgacaaggaattgaggccaaaaatggggagaagtgggtgatccagggttagagaaaaggaggaacagagaaatggggtcaaagacccaggagggcaaacatgaggggcagagaactgggaaccggagagagactccgagggacgagggaccagaggcagtggggcaggcctgagggctagggcaaggggcggggcctgggtgggctgaggctggagctgggtgccgggccaccagggatcccacaagggccggggtccagccgggctgggggggactcagggctccaggggcatcaggcgcggtgctaattcagcgccatcgatcagatgggatgagagcaataaattattgtgacaagatgcaatcctggcccgcgcactgccgccgaggcggatcgatccctgtccccagccccacaccgggtcccatgcccaggcctgggctggaggggatgcctctgcccacctctccctccattctccaccctgcacacactcactcccactgacagccaggtgaagggaatgtgaggggcagcctagggaagaggcgggagggggctgggggaacccacagagggaagttcagcgccccctctgacccaggccttttgcttccctcagcaccccatcctcaccaccacctgtgaggtaggaactgccatgatggatgcccatttcacagatgtggaaactgaggttctgacaggaaaagtaacttggccaaagtcccacagggatgaggtgagcctggacttgaatgcaggtcagtatgactctaggcccccgatatttgtactgtcagaggacagagcaagggccagagacagaaaaggaggaaagagacaagacaaggagacagacacagagtccaggatatggagaaactgagagagagtcagagagctgtaaagaccctgtatggagaaaaacagacacagacaaagacaaccagagaaatacagagaacaaagagagactgggagacagacagacagagacaaaaagacagggtgagacagaggagtcgagaggccagaaaccaagagagacagagagactcagaattaagacaggcagacatggacagggacaaggagacaggggcaggtggtggcaaaggtggaaatggagaaaggaaatgaaagtgagggtgggtggaaaggaaaggccagcatgcagggaggggcggtgtgggaggcaggagtgtgtctggggaggcaggggtgtgctgggagggggctgtgctgggggggtgtctggggaggcggaggtgtgctgggacggggctgtgctgggggtgtgtctggggaggtgggggtggatctggggaggcgggggtgtgttgggagggagctgtgctgggggggtgtctggggaggcaggggtgtgctgggagggggctgtgctggggggtggtaggggtgcgctgggaggggctgtgctgggggtgtgtgtggggaggtaggggtatgctgggagggggctgtgctggggggaggtaggggtgcgctgggagggggctgtgctgggggtgtgtctggggaggtgggggtgctctgggagggggctgtgctggccccaaacagcttgtgggggaggtgggggtgagcatgtggaatgacagccttagccccaggagtcaatgaagggtgagaaagtgagcctggagagtaggggagatggggttgggaggtaatggagaagcaagtgtcaccaaagtccctaggtggataggtgtgtctgtggagggaggaggtcacctgaggggcagatgagggaggtaaggacacctggatggctaggagggcagtctctgaagtcagacagccttgacttgactcaaatctctaacatctacctgtttctgggacctcaaagaaactctctggactcagtttccttctctgtaaaatggggacaagaggcaagtacgtgcctcatgagggtcctgtgaggacaaatgagacaatgggtgtgaagaacttggtgtctgtcacagagatggatggtggtcttagtaatcgggagctgtcatcaccatcaccctcacctttatcctcattctcgttgtcgccatcagtatatatggggagggtaggtgttatgtggtggaacaggtggggcacacattacaagcacctgctactcagagaatgatacctggaccaggtgtttctgatgcacattgaagtcagataacctcggacttaagatgctgtgcagtgcggggagcaggtgtgggggtggctgggaacaggcgacacatgtgtctaacacatgctacaggtgttatgcacgtggaggaaggcgctcctcgaggagagagctggtcagagacacgtgctaggaaaggggaccggtgtttctggagagaagcaggttggagacaggtgtgagagatctgaaggtttcttcctaaaggtgtggtggtgacaagctgcagggacaggtatcaaaagtgaacatagcagagaatggggcagaggtgtgcagtgggttcccaatgcttgcaaaaggtgcaaagggactccggtcacatggatgtttggggggaggaaaaggagagaggtggctggagtgtggggaaccaggtgcatgtctgtgggacagggctgttttcaggaggtgacccctagacccagctgaagagatgtgaagcaaagagagattaagtgggggtatgcatagtgggtgtcgaagcctcggtatctgtttgctgattaaatgatttgaatgtgttaccagggcagaggattccctgggataaacaggtgaggaatggcaggtgcagggggttactggtgtgaccttgtgcagcaagagagagagagaaacatgggaaattaggtatgtgggaaagaagagaagtggatagagagtacctgagggacaggtgtgggaaaacaggtatacaggtgacgcagatacctgtggccaaggacagactcctgccccaaacgtgtgtgtgtaaagtaatgttgtgtatagtgagagacagtgagagaccaggagaggcaaagacagtgcaagaaggagtgagacacaggtgagcaagtgtacaagggaccgggaaactctgaggggacaagagcttggaggaaggcataatggcagggaaagccatgaggagggtactagtgtgtggattggtgatcaggtggtgcttggggttaggacacaggtggggaaggtgcttctgttgtctgtgatgagtaacccgaaatgacaagtaggaaagacaggtacgggggaatccttggaagtcagtgtaccttggaagtcaggtacaggtagagagggatgtgagcgacaggtgtgctcttaggtgacctgtgtgtggccagctcttctggaagggcaggtgttggggtggttaaggaggtgcaacactgtcacggaggaggatgggtgagggccaggaggctggggactggtgggggcaggccttacctgaggggacaggttagcaggttgcatgtgtgagtgcttgtgtgcaacagaaggaatgtgtgtgtgagtgtgtgcatgtgtggtgactcggtactgcttgagaggaggaagaggtgaagaaatacgaatgtgtgaggaacaggtgagtttgcagctttaggggacaggtgggatggctcacgtacaggtaggaaggggccagtgtgacatgaaatgagataaaatgcagggattccagtggaaggggcagattttagagaacaggtattacctggaggggcaggtaagaggggacgtatgctccccgagagaccagacatcttaagggcaggtgtgagggggacaagtgttacctggaggggcaggtgagaggaaataggtgttacctccagggcagatgaagggaacaggtatggaggacaggtgttgcgtgcaggcaggtatgaggagatagatgttacctggaagtccagatttggggagttgaagggggaacatggatgtgacaggtgcattgatagacaggtgtgaaaggttagttacctgaggccacaggtgggtgcagtgtgactctgccagatggtctgccacctcgatttctctcgctcccctgtcctcccctccctggggagccagttctggctctcgggtccctcccgtggctctggccctgggtggggcacagagttagctctgggctaggcgaggcctggcctgctggcctgccgggcagccagggcccctgaggctgcttggcgatgcggagcgcgtctgggccgcggcggccggccgggaggggggagcgggcgggggggccgtttagccgtgatagatccgcgcgccgcttgtctcttaatctccagagcgaccgatcgattcgctatttccctttgttgccagaaaattcgatcctgggcctggaattaggtccccggcttaatctgagcggaaaccagcgagggggagacagagacagagatgctgggagagacagagacagagagacagtaagagacagaaagaggcagagagagagagatagaaagagatgccgagaaaggaagagagagagatagatgccgagaaaggaagagacacagggagagataagcacagagatttagagagagatagtcttaagagttggacccaaaaaggaagagagagatgctgtgagagacagagatagagagacagatcctgggagagttagaggtggacacagagatgctgtgagagacagagacagagagacagtgaggagagacccagccaggggagagataacagaagtggcccagcagggccctgcgacagtggtggaatgatagaaagggtgtcccagagggccccggccccacgaaggtcagggccaggcctgtactccttgccccgaagtgtgcagaccccagaattggcccaaatgtccttcccacagaccctgtgacccctcataccaaatatccagaccccagatatccagatccaaattcgcagacccttagctttgaactccaactccaaatccagacttctggccccctcaagtccaaactcctatgctgatccccagtcccagatatccacacccccagtcctgactcccagccccagtcagctcccaacctcagatatctagatcttccgccccaagtgtccagtctcttggctttgagcccctaggtcccaaatatgcaagccctcagccctgacctctaaaccccactcagaatctagccccaaatatccagactcctcagccccaaacatccaaatccaccttcaggtcggccaccaacccccgttcccagattttcagtccagtctcttgcagaccccatctccgtggctctcactcgctctccctccccgcccccaaatctcgcacccctgtcccgaggccgcacctctagcgctacccgcctcccaccttcccagagttgggcgctgccccacctgccccttacagccggggcggatgaccccatccgcctacccctccaccggctcggaggcccagcttctcaggcctcccgggaccacccccgcgcccgccccctcctggggcgggaatccccgccccctccccgcccctgcgccggccgcggcgctcactcactttctgggcttttcgcatccgctccggtccggggagaagtgtttaaagttcggatcccgcagccatggcccccgcggcgtcctggggagggggcaccggggcgaggggcggggtggggggagatgcccggagccccggggaggcagagacccagaggacgaggagagggagtctctgagacgccgggacaggagagactcagagacggagagacagccaaggagacagagacggggagacgagcagagacggggagatgcagagagggagagagacagcgagatagacgcgcaaagagagcagagacggggagagctgaggacggagctccgggctggagctcagcacagcgagcgcgggcgggcgcgcgccggggacagcctggccggctgggggcgcggggcggccctgcctcctgcgccttctcctcttcctcctcttcctcctgctcctcctcctcctcgttctcctcctcctccctccactcctctgcgcgccgcgcgcctcccgccctcgcggccgcccggccgggctcggctcgcagatatatggaggcggcggcggcggcgcgggggagggggcgggggcgcgatcgatggaatataattttcctcaaactcggaaaataaagttcagagctgatcaaatttgaaaacagatgtcgaatcgcgactctaaataaggttcgatcccgggactgagggagtgggggtggggcgggggtgggtggagaggtggagagacccccctcctctccccttcccttctcctccgccccgctcctccctaagtggacgcgcggacaaacggacaggcgcgaggtggaggtggcgacgatgcgtccaggacccctgctggacacgcaagcctggaccgggactggaacacggacccgcacacacgcagcctggataggagatacacggacagagggacatatggatacagtaagacagtgcaaacacacactcagggacacacaaccctacagagagacagacacagacacacacacacagacctgccatctatacacgcagcacacacatgcggaccgtaatacaggaagtggaaacacaaccggtacacggagacattcaggcacacacagagaaacatatgcacaaacacagcctgcacaccacaccttccccaacccacagccactccctgatccactgacccacaaactggacacaaagacaaccagatgcacacacagccacactccactcccaacacacagcctggacacacaagccctcactaacacataggcagaacccagggctggcacactgacactccccttcacactcccacaaggtcacaggcacacacacgcacacctacagtgacaggaaagggccctgcccagccagatctgctcccattgaaataacaagtcaatatcgaccagcctcagggcgggtcagacccacagttcagctcccggccggccggacctcctggcccaacctgaccctcaccctcactgtctaccctcctattccctcccttgccccttgcccctcgccccttgcccctcaccctgccctctctcccgcttccactccccaacccaccacccccgacttttctctcccattcccaggtcaggctccgccccgccaagtcccacaccaccttctctggggaaaggcagctctcacctgggcagcccctggaggcttctacccctagaggggaaaataggtctcacggcaagacagcagtccccaggtggatattcaggggccaggacagctctgtcggatctcaccaaccccaccagcgcccaggtgctgagaccgaggtgctgagaggctagaagagaacttcagccctgcctgacagagaaggttcagcctcactcccgctcaccactcactcaggcaagtcgctaaacatccccgagcctcaagtttcctcatctgcaaaatgggacaataatgacctccctcctagagtggttgggaaggttaaaccgcagggcgcatggagcacagctggtactgcaccaagtaccaagtaaacacgcatttgctgtgagcttgctgcttccgaataatctcattaaaaatattaagaattttgccagataacaagaattccttcacttgtctgtaccttcacttgtctgaaagggaacattctttcaaggagccaacaggcttcactgggctccatttacgaccctttcccccagagccatggttctctgggtgtccataacagccccgggactgtccacagcctacttgaacacaggtcaccagctacagtgtttgtgcatatgtttctgtgcgtgtgcctgaatgtctccatgtacgggtcgtgtgttcccacttcctgtattacggtatgcacgtgtgtgctgcgtgtgtagatggcaggtctgtgtatgtgtatctgtgtctatctctgagtttatctgtaacacccagcacactacagagagcattccccctctacacccagcacactacagagccccctcttggctctgaaagccaaggaggaggttccggaacaccctctggaaggcaggactcctcccacacaggacaccctttgggagaaaggtgacaccctctgggtagatatgactccttggctacacccttcaagagagctgggacaccattaaggcttcaagtacaccaactggaatgcatttcatgaccattaaacccctgtgaagagggacagaacaccttctaagcagaaagagctcaattgactgtagataacacccttcagtaagataggacatcctctggagagatacagtttatcacaccatacacgacaccctactggaaaatagaacatctttggaatgtgagggacagacacccttaagatagcaaagaccatcagtcaatagggctttaagactttatctctaaaccacgcccctctgggagacaggaaaacgtccccaggtgtcagaaacacctggactgtaatgttaacacctttgagggtcttgcaatgcccaatcagagggtggggaggaccccccaaggagagctctgatgctcttggggctggggttgggggggccaggacccattgccttgtgcatcccacacaccggtaggaatgggaacagcacccgtctgactgtttagaacaccctcagcaccccccacccccagaagacaccgtcttgatttctggaacacctctgggggctgtgcattttggagtaatttatgctccctctctgagtcctagggttcgggaggatttgtgaaaaggagaccagagcgtgcagcgctgtgtaaggcacatagtaggtgctcagtgaaagagacccctcactgcacagcacgcccgcggccggcaggggcacacgttccctcgttagcagtgttgccaactctgcctacttggctgaaggaagcgtctcacaggagggggatcgttaagctgtacttaacatccccagggaggctgcagcagcagaagactgtagttaataccccactgagagaggacgccctcagggtgtttaatgccccctaggagagagggagacagagagagggagcaggagaataccctcaccagcctctaacacccagtggactgaatttattacccgtgaaggagagagcatacctctggggtctgtaatatcctctagactcttgaaacccccaagagcaagaggacccctccgtgagggctatcggctctctcgagattgcttttaacaaagatgcctcctggtgcagctgaaaccactaaaggtgacagagggtgaaaccaggagccccccaccccaagattccatctccttaactctctccccaccactgcagccctcctggaaccacaggaacaaaagggaaggtgggggtggtgtgggtaggggaggttgaatggggcccaaatcccagcatgtcaatagtcatgacaaggaccatttaatgggatgtgcctggcagtggcctaaactctatacacagattaactcaagcaagtctcacggcacaactctaagaggtagatgctgttataagcgtcacccccacttttactgatgaggaaactgaggcacagaatcacttgccggctgtcacacagctagttagtattggaaggggacctggagccaagcagcctggccgaggggtctgtgttcttaaccaccaggccaccctgccctccccgctgcccccatattagactaggagcttgcgcagacaagcgccctgcctgcacggctctgcgtcctcccagagcagggcccaccctaccactgtgtcctctggctcagtatgaccgcccaccatccccgatccctcggggcttgaggctccctgtgggcagggcctgtgcctgattcatctctgggtccctgctgagggcaaagcctagcccacagggcctggggaggaggcagggagggagggagaggggaggagggaggcagggagaggacgttaaagagagcagggagggaggtgaggagaaagcaggcagagaggggctggggagaaggacggggagtccccggggagccgggcctggagctgggccaagccacactgctgtggatgttggggagagcagagggaatgggggagtccagtcagctgggagaggggtgcaaacaaacagcatggccacccctccctcaccccacccctatcccgggtgggagaagatggaccgagatgggcctggaaggtgaaggatgaaggcccgggacgaacaagatgcaaggagggcagacagacacaggacagatgggagccaggagagcacggggaggcagccagccagggtgtgtgcctgggggcgggaattcagacagacagacaagggtgagggaaaggatgggcgagggtgttggaagactggagacagatgtgggggctggtccaggaaaaggacagacaaacttagggcttggggctggggcaggagggacagacagacagaaggggagagtggccaggaaggaggggaggatggacacagggcgtctgcagaattggtgggcagatggacggagggacgggccgtgcagtgcagccggcggggccagggccaggccgagggcgcgaggtggcagccggcccggggaggcggaggctgagcgagcggtggtgtttgtggagctgtcggctgcggtggaattatgaaaaatagcaggcatcggagccggccttcagcttcgattaggggagatgggacatgacaggtgcgatcaatacgcagccgttctataaagtgtcaagtaatgaatcaatttcgactaaattttccatttttcagaggccgttctccgagagaagaatatcctcttttgtaaagatattattatcgatttcggcggcaatttgacatcaggggtagttaattccactcagaataaaattgaaaacacttgagagagaaaagagagaggcgaagagtgagacagagagggaaagagggggagggagggaggggctgggagagagagatggatggacagagagacagagacagggagacaggaacagacagtgagagagacgagagagagaagagagatgcagagatgcagagacatgaagagaaacttggagactgcaaagcctagagttatagagagacacagggacattcagagagactcagagagcagagacaccctaagaaagggcgacagagagacaaattgagagtggctcagagagaaaatcccagatgttactaactggctacagagaagcaaagaaatggacaaagacaattcagagaaaaagacagatggaggactgggcagcagaaactgatgacacagacagacagacagacacacagaagtgagaggctgagaaacaggaacttagggaactggggagaggggctgaagggtgtgcggagcatgagcaacagagaaaagcgagcctggcagaggagaggccagagaggcagagtggaggggtggggggcagagggtaggagaggggccaagaggctgagaacctgccaggaagtggggaggaaggggcaagggtgccaggagaagggcagaggctgagggtttggggctgagggccaatctggagatgagagtttggggagatcctcctgtcctatctacgctgtccccaaagtcagttgccctgaatgggcagaagctcagcgtgtgtgtgtgtgtgtgtgtgtgtgtgtgtgtccctgagatctggtgtgcatgtgtgttggctggtgtctgtgtgtccttgcatgttgactgaatcccatatcccattagacgtttgtgtttcctggacacacacacaatctgtttgtgtccctgtccgtgtgcctgcacatgctgtgggtccctggtctcccagtcccttgggtctcagctgcaggcaatggtgacaacatttctggttagtgcctgtcagtccccagctgaaatctccatttatccctgagcaggtcacaggctgcctgggaggaagagagaggaggcgggtagaggataggacccctgggttctgagagagatgacccaggacctgtactcctgggtctgagggaggatggtctcagatcctgggctcctgggtctgagggaggaggggctggggattggacccactgggtctgagggaggaggagctgggagcctgactcctgggtctgagacaggagggcctgggggcctggactcctgggtctgagggaggagggcctggggacctggactcctgggtctgaggaaggaggctgctgggggccgggactcctgggtgtgagggaggaggggctgggggcctagactcctgggtctgagggaggagggactgggggcctggactgctgggtctgagagaggaggggctgggagcctggattcctgggtctgagggaggagggagtggggctgggacaccccatggacaggatagtcagcagacaagtaagtaacagggctggctgggaagcccccgagccatcaccagcctcccctccagaaaagcctgtgcctgctgccccctagtggacatggagattaggccagaccagggacagggaactgacaggtcaaggagggaagccagaggcgctgacccaagtgggagcagagacaggggagagggagagagagaggagggaagagagaaggaggagatgggtggacagacaggcggacacagacagggacaaagatgaatagagaagtgggctggggtcaggccgacaggattgaggactcgaccttggtggagaagaaagagagaccggggagtgagttcagggctagaactggagatggacagggaaagatggaggacacagggggtctgcagcagacggcaggcagagggtgagggtgacagagagactcttggacagacagaggctgggctggtgagacctgggtacagacagtacaagagacaggacaggagccatatggacagatggacagtgacagagggatgggagctaggtctaaaggagggagaaaacccagagaacaggcagcgaagaggacaggtggacagggacaagggcaggcactcatggagagacagacggacatcggagggaaccgcagacacacccagaagaaagaggtggacagagagagagaaagagagacaggtggtcacacacagagagacagacggatgcggagaaatcagggctccccaagccaagtggacacccggagatgaagcagagagcggtatgtggggggagcccggagcccggcggggattccaggctgaggggctccctgtggcaaagcctaggagagttgctggggaacagtctcccctggccggggtctctgcccgccaccccctcccaggctccccccccacccggcgggctgcccggcggaggcgacagattgagcgatgagacgcattacgcacttaatccgcctgattgaatgttttgctttcgcccaaattgaaacattaaacaacacgggacgagaagaggcggccgcaaatcactcatgaaagattcatcttctcccaggcagccgccaccgcccgcctccaaggctgcccgccccagccgggaagcctcagggtgggggtgggggtggggcagcacccctgctcactctggggagccccagccctagtggtctggggaagttcttcccactgtctcgcctcaatcctacaggtggtctcagagactagaaccctggatccctcggccttccctggacagcatgaccttagccctgtccctgtccctctctggctggggaatccttgccctctctggggtccatctctccagttaccttcctggaccagcctggacctttgggacatggaaggggctgctcagagttgggggatgaggtctgggagcctcctccccgtgcagtggggctttctgggttcttgatccaagagtgggggtggtgtctgggggctgagtcagagggaggtggccgctgtgtcaggatcagtgcaaatgggcagacagggagtgtgttccctgccacttgggagctcagtgtgtctctgtgtctgcctgcatatatgactgtgtatcttctgtctcgctctgcccatgttggtgtaacttgctttgcgattgtccctgtgtcactacactcaggtctcggtgaccctgcgtgtgacggtaactctgtgggcttgtgggtatgtctgtctgcctgtctggcactttctgtatgtgcgtcctgtgggcagcatttttgtgtggtgtgtgtctgtatcagtgtgacttttggggtgtggctgtgtgtgactccctgtgtgtaagtctgtggatgactgtgtgccgtgtctgtctgtctgtctgtgtgttgcctgctctgggtctgtctgcaggtctgtgttgaactatttctgtgtctgggtctcttttctgcatccgcatgtccctgtgtctctttcagcctctgtctctgtctctgcctgagggggcacctgctggggccactagaggaaggcctgggtgcggagaagctggggagagaggaggcaagaaagacggagagacaggacagcggtgacgcctgagaaccagggagcagggagcaagcgcgagggagctgggggggccgttgtgggcgccacggccggagtgggtgatcaatattcgatttaggttttaattccggggcttttggagcctgtcagccctgatgtatgagctcacactggggccgcccagccagccaccccaccagtgcccatggcctggtggcctgtcctgggctccctggccctgccggcggtggactataggagaggggggaaggggagaggggcccagtgaacttgagcttggtcccttgcccacccagtgcacctatggcccctgctcctgcctggcctgccaagcaaggggcccctagaggtcctcaaacacctggtcgggtcccacagcctgcctgtctgcatggacctcatgttcagacacacacatagctctgggctcatatatgcctgtgcccatgcaaactctaacacatacaccccgggttcaaacacacatgtgcacacacaagccaccatgcatctcctctgacatacatgtgtgtccacatacaaactctgacacacatacgtggtccacacacataaccccaacgcatagacacataaaagcaccacatgaaccggaggtgggaaccctggggacacagcattctggcaagagaggcaagagacggagacacagaaactcagacgggctaacagtgagagatgagagagacggaccagtgaagagctcagagaagagcttgagagtggggacagacgcggagagcccccgaggggaggttggaggccacagggcagagcagtggacagggctcagcagtgagggggatgggagcccccccaaaccctgtctctttctcaggaagatggatccaccgccctccctgatgacaatgctgtctgcgcaaactttaattaacactttgagttaattagttcgagatcatttaggagtaaaatgtttttattagggaggctgcgagcctgttgatggatggggcgcgattcgctcttccgcctgcggggacagccggtaaacagaaatcaatcaggggcctcccaacccagcccccccagagccaagctcccagcctagagcccaggagtggaggctcccagcctcctccttcccccaggccccagatttcaggccccagcccctcctccctcagacccaggagtctaaaaccccagcttcctcttcccccaagacctacgagtccaggctcccagcccctcctccattaggctcacgaatccaagcccccagcagtctcttccctcagacccaggagtccaggcacccctgcagcctcctccctcagacccaggagtccaggcccccagcagcctcctccctcagtctcatgagcccaggccccagcctctcctccctcagacccaggagtccatgcccccagcctctcctccctcagacccaggagtccaggcccccagcccctcctccctcagacccaggagtccaggcccccagcccctcctccctcagacccaggagtccaggcccccagcccctcctccctcagacccaggagtccaggccccccagcccttccttcctcagacccaggagtccaggccccccagaccttcctctcccagacccaggagtccaggcccccagcagcctcctccctcagacccaggagtccaggcccccagcagcctcctccctcagtctcatgagtccaggccccagcctctcctccctcagacccaggagtccaggcccccagcagcctcctccctcagtctcatgagtccaggccccagcctctcctccctcagacccaggagtccaggccccaagccctcctccctcagacccaggagtccaggcccccagcccctcctccctcagacccaggagtccaggccccagcctctcctccctcagacccaggagtccaggcccccagcccctcctccctcagacccaggagtccaggccccccgcgtctcctccctcagacccaggagtccaggcccccagcccctcctccctcagacccaggagtccaggcccccagcccctcctccctcagacccaggagtccaggcccccagcccctcctccctcagacccaggagtccaggcccccagcccttccttcctcagacccaggagtccaggccccccagaccttcctctcccagacccaggagtccaggcacccctgcagcctcctccctcagacccaggagtccaggcccccagcagcctcctccctcagacccaggagtccaggcccccagcagcctcctccctcagtctcatgagtccaggccccagcctctcctccctcagactcaggagtccaggcccccagtagcctcctccctcagtctcatgagtccaggccccagcctctcctccctcagacccaggagtccaggccccaagccctcctccctcagacccaggagtccaggcccccagcccctcctccctcagacccactagtccaggccccagcctctcctccctcagacccaggagtccaggcccccagcccctcctccctcagacccaggagtccaggcccccagcccctcctccctcagacccaggagtccaggcccccagcccctcctccctcagacccgagtccaggcccccagcccctcctccctcagacccaggagtccaggcccccaggccctccttcctcagacccaggagtccaggcccccagcccctcctccctcagacccaggagtccaggccaccccagtttcctccttcagacccatgagtccaggtccctgcctctcctggtcccagcttggtcgggagtccacttctgtcgcaggacccggcttccgggcccccacctctaacctccctcggatgcctgaaaaccctgcctggtcctccgggcagccgcccccctctcccacccgcgccggcctcttggacacagcactagggtcggattcacagttgggagctccctcggctgcgggtcagaccctcccctccactccctctcgaggaccctgactccgcggccccggaactgtcttctcgccgcccctcggcgtctctgcgcgcctgtctcatcgggtctcggccgagagacgtctcgggcgtccccttcccccgcggtgacggcttcatcaggtgtccgcgcgggcgggggcagggcgaggcctggcgggcgcggggagcccgggggcggaggggcgggggttccggggccgataaatcttcatcaggcggcggcgggggggccattaggcgctaatgggaagatggaggggcctgtcggccgcgcgggccgggcctcatttgtcctgcttcccgctccattggccgctgcccccgccccgcccctcccccgccgccgcgcgccccatttccgcttcaaacctttggaggggacgtgggggggatcccgggggctgctgaaaaagaggcgactggaaggcagggacagattcaggaaaggggagggggctcagggcatggaggggaagggggttcggtcgcagagccagtttagaacgtgggtggctcagctagaacgcaggcggagtgggcaggagaacgtggcggggagggcttggaacgcggagaacgtgaatagaagtccccgaaggaaaagagaaagcgggagggggccgtcggggacgcgagaggggacttggaagatgggagtggcggggactggaacaaggcgggagtgggtgcaggattggaattaggggagggggtcggatcgccggccccagcctccaagggcggggatccgggaaggcgagggggcggcgtcccccgaggcagaaagcgcggaccccgcctgtcgccgccgccgccgcccgctcccggactcgcgccccccgcgcgtccactctgatttctcggcccatttttcttcctctcctgtcactccggcgctcgccctcccgccgccggctgccccgccgcgctccgcttcccgcgggaacccccgctgcagccagccccgggggctcagccggctccgcgcagcagcgcccccacccccaccacgcctggccccgatcagtccccaccaggaccacctatttccccaagtcggtcacccacaaatggactgcctccccgaacacccccaggagaggccccgccttggggggtagcactggggttggctcccccagcccctgggactagatccctaggacctcaggaccctagactgagattcccccaaaggaggcatctagatacccacaaaccaggccttcgaacccctaccctccctctgaagccctcacatggactgaagacccctgggatcagacctagacatgggcctggatcaccccaggcggagcgaatggctaccccgactcacaaacagaaggtgataacccagcctagctccagacagcccaaaatgaggattctggggcccagctccattcacccccaaacaagtcctccagcccaagacactcagagaataagggaaatggaccttagctcagtcaccccaaaataagcatcagtaaccacaagccccccccaaactaggcatgtattccccatactgtcacccccaaattagacgttggggccccaaatttggcacacctaaactagactttcctcattaaacctcatcaggaccccaagatacaccacccacgatctacaaaagtaggccccagctgctatcacccactcagcatgtgaccccattctcaacacatacaaactagaaaatgggactgaaattcaaacacccttaaactgggcaaccccaaatgtgacaactggatcctcagactcaagtcaaaatgaggatctgggcctcacccaccctaaggctcccccaaactagacatctggctctccagactcagtttccactaaaccaaggaacctccgaaatgccccagcaagtcaccttaacactagtcatgtaggtctctacgtagcatcacccctaaaccttgcatccagacccaatcattggtcaccctaacctatgcatgtggacaaccaacttttttttttttttttttgagacggagtctccctgtcgcccaggctggagtgcagtggtgcgatctcagctcactgcaagctccacctcctgggttcacgccattgtcctgcctcagcctcctgagcagctgggactacaggtgcccaccaccacgcctggctatttatttatttatatatttatttttgagacagagtcttgctctgtcacccaggctggagtgcagtggtgtgatctcggctcactgcaagctccgcctcccgggttcatgccattctcctgcctcagcctcccgaatagctgggactacaggcgcccaccaccacacctggctaatttttttgtatttttagtagagacggggtttcaccgtgttagccaggatggtctccatctcctgacctcgtgatccacccgcctcggcctcccaaagtgctgggattacaggcatgagccaccgcacctggcctttttttttttttttttttttttttaaagacagggtcttgctctcttgcccaggctggagctggagtggcatgatctcggcttactatagcctcgacctcccaggctcaagtgatcctcctgcctcagcctcccaagtaactgggacaacaggtatgagccaccactcctggtcgaccagcagctttagaagccccccaacttggcacctggaattccagcatcacctgcccttacaatacacatctgagctttcacccccactcataagagttagagacccctctaagttaccccacgaactcagcatctagcctcccaacctcagacacccccaaagttaggaggactctgtggcactgaagctcagatctccaaactaccccttttgtccccaaacttcagtcaccctacactaagcaccccataggctgttacccccagaagtaggcaagtcaagaacccccaaatcaggtatgtgcagctgaccctcaaggtcagtcttcctaatccaaacaccaagaagctcataatcagagagacctgaacttgggatttagagtacctgcctcaaacaccctcatagcaggttggatggtggccccccaaaaaggtatgtccacatcctaaccccagaacctgctaatgtgaccttacaggaagagtctattcagatgcaattaaatgaaggatcttgagatgggattatcctgagttgctggggtgggccctcaatccatgttaagggacctggtaacagacaagaagaggccggacgcggtggtttacacctgtaatcccagcactttgggaggccgaggcaggaggatcccttgagcccaggagttggaggccagcctgagtagcataccgagacctcacctctacaaaaataaaattagctaggcatggtggtgcacggcttagtcccagctactcgggaggctgaagcgggaggatcgcttgagtttgggagatcaaggctgcagtgagctgtgatgataccactgcactccagtctgggtgacagtgagacctcttcacaaaaaaaaaaaaaggtgggggggccgggcacagtggctcacacctgtaatcccagcactttgggaggccgaggcatgcggatcacaaggtcaggagatcgagaccatcctggttaacagggtgaaaccctgtctctactaaaaatacaagaaaaaaaaaattagccgggcgtggtggcaggcgcctgtagtcccagctacttggaaggttgaggcaggagaatggtgtgaacccgggaggcggagcttgctgtgagctgagatcgcgccactgcactccagcctgggcgacagagcaagcaagactgtctaaaaaaaaaaaatccgattgaagccactcctaattcaggcattgagcctcccagaggatctgagtctctgtgtcagtcacccctaactaggtatctgggtgattagcctcagacattcccacactaaggaacaacaccccgggccgggcacggtggctcacgcctgtaatcccggcactttgggaggccaggtgggcggatcacctgaggtcaggagttcaagaccagcctggccaacatggtgaaaccctgtctctactaaaaatacaaaaattagttgggcattatggtgggcgcctgtaatcccagctactcaggaggctgaggcatgagaatggtttgaaccaggaggcggaggttgcagtgagccgagatcacaccactgcactccaccctgggtgacagagcaagactctgtctcaaaaaaaaaaaaaaaaaaggaacaacaccccaaactccatcaccccaaactaggtacaaataaccacaaaccctggcaactaggtcttgagactcagtgagccccaaattgtatataaatgttaggaactcataactagtagccctcaaaccagacatctggttgccttctcttaatctcccaaagatgggcttctcatacacgagagtgacacccccaggaggcatctgatgacacaaccccagcttggcactggatctgctgagggacatctgggccccagctgtcaccccagattgatgttcgggctctcagatggtcatcccaacctcaacatctgggcagctgggattacacactcctaaactagacatctgaatgttttgccacaactacccacaatctaaggcattttggatttgagccccaaacttgggctctgaaccacgcccccagcctcagaactccctaactgaacatcatggtaagtcacttctattttggatttagggtcccagccttaatttgttcccagattagaatataggcccacaggctgggcgcagtggctcacgcctgtaatcctagcactttgggaggccaaggcaggtggaatgcccaagctcaagagtttgagaccagcctgggcaacacagtgaaaccctgtctctactaaaatacaaaaaaattagctgggcatagcagcgtgcgcctgtagtcccagctacttgggaggctgaggcaggagaattgtttgaacccaagtcccagctacttgggaggcagaggttgcagtgagccaagatcacgccactgcactccagcctgggtgacagagcgagactccatttccacaaaaaaaaaagaatacaggcccacagtttcactcacccctaaattaaccttcagggcctcaaggtcagcaaaaccacagcaagtcactctcaaaataggcatctgagctccacagccacccacccacacactttgcatatagcctcccagtctcagatgtccccaaaactagggcctggggcacccaggctcagtgacccccagactaagcaagtgagctccaaacttcagtcagccctaaggtaatcagtaggacccccaaatcaacatgtgggctgccaacctcggtcaccgctaaacctcaaaaccagtcaccctagacttgacacctgagtctccgaactgactcaccccaaacatgacaggtgaaatgccacaggaagtcacttctaatctagacagtaggcccccactgtcgtcactaatgtgggtgtcagtagcccccatccccggcctcagtgacgaagccacacaactgcagacatctagagctgggtgttgggtgtcccaaaacaggaacaagggctcacacgtgcccagaactgggcaggaggaactccaggcaccccaaattcaggatcttgagccccagcatccatcttctcaaagtgagaatctgagtcctcagtgttagtcacccataaacaatgcatcttgactaccacaaccaaccatttgcccccaaactagggttttttttttttgagatagggtcttgctctgtcacccaggctggagtgcaatcatggtgcaatcatggctcgctgcagcctcaaactcctgggctcaagaggtcctccctcagcctcctgaatagctgggactgcaggcagttgccactgtgcccagctaatttttttgttttttgttgtagagatggggtctcactatgttgcccaggctactcttgaactcctgccctcaagggatcctcccaccttggcgggactagctgggactacagcccagctagtttatttttatttattttattttattttttttggagatggagtctcgctctgttgcccagagcaagtggcgcaatgttggttcactgcaacctccacctcccaggttcaagcgaatctcctgcctcagcctcccaagtagctgggattataggcgcacaccacaccccagctaatttttgtatctttagtagagatggggtttcaccatgttggccaggctggtcttaaactcttgacctcaggcgatctacctgcctcagcctcccaaagtgctgggattacaagcgtgagccactgcacccggtccagactaggctttagacccacaggatcctcttgtgtccagtaaagggcagctgggtctccagggccagaaatcccaaggttacctgtgccccagccacagcgacccctaggccaggcattagagcctcagtctccatcttcccccaggggtctctatcactgccacccacaggtgtggaggtgctttgaaaacactggccctccatgtcatagacatgaagcactcctcaagtgggtcctgagtcctggggccctgacctcttgacacctccattccaaatacccagactcctagcttcagtgaccttcacacaaagctccacaccgctggccacactcactcagagaccccacacctgagtacaggaaacccttgactcagttgtcccaggaacattcaggcatcagcactctcaggctcagccatgtttagaagggaccagcaccctagactctgcgccccagactagaggactgaaatgacagctcctgccgccccaagtcaaaacaggcacccctcagcctcatccctccagctgcacaactatgccccaagtctctgtcccccaaactaggaagtctctgccacccagaactgggaaactgtatctccatctctgttaccccaaggccgggccttgacttctggtctcatcaccccaaactagaccactgatcccagtctctgcctcccccaaatggacaactgaaccccaatcactgtcagctcaaactggacaaaaggaccccagtcactgtcaccccaaactagaaagcaagaccagtagtctctgtcaccccaaacatgacatggatgagtaatgtctggcacatcaagatagacaacaagacctaaactgtcaccagaaattggcaagtggatgagcccaggagttcgagatcagcctaggcaacatagtgggaccctgtctctatcaaaacaacacaaaacaaaataaattagctgggcatggtggcacgtcccaggaggcctaggtgggacttgagcccggggaggtcaaggccacagtgagccatgattgcgctacctcactcctgcttgggcaacagagtaagaccctgtctcaaaaataaaatgaaataaaataggccgggtgtggtggcttaagcctgtaatctcagcactttgggaggccgaggggggcaggtcacttgaggtcagaagttttagaccagccagatcaacatggtgaaacctcatctctgctaaaagtacaaaattagccgggcgttgtggcaggtgcctgtaattccagctacttgagaagctgaggcaggagaatcgcttgaacccaggaggtggaggttgcagtgacccaggatcgcaccactgcactccagcctgggcgatagaatgagactctgtctaaaaaaataaaataaggccaggcacggtggctcacacctgtaatcccagcactttgggaggccaaggcaggcggatcatgaggtcagaagattgactccatcctggccaacatggtgaaaccccatctctactaaaaatacaaaaaattagccaggcatggtggcgcatgcctgtagtcccagctactcaggaagctgaggcaggagaattgcttgaacccaggaggcagaggttgcagtgagccgagatcgtgccactgcactccagcctggtgacagaacgagactccatctcaaaaaaataaataaataaaaattaaattaaattaaattagcaagctagtctgtcacctcacaaatgtactgggacaatgatctctgtataacaacctacacaaccagaccccatttctgttacccaaaatacatgcaggggccccagtccgtttcccaaaagcagacaaccagatacccagtctctgtcacccatatatactctgggacccatctctgtcctgtaaaactagacaacctagccctagtttctttgccccaaatactgcttggcacccccagtttctgtcactcaacactagacaaccagaccccagtctctgtcaccccaaatatacccagggatcctaacctctgtcccacaaaactaggcaactggacctccagagtctatgaggtcacatgttccctggtctctgttttctccccacaaaactataaaaccaaatgctccatctctgttaccctgaatacatcaccctgggacccagtctctgtctcacagccctagacaaccaacccccagacactgccaccccaaacgggacaattgtacttctaggcttctagggtctgtcacaccacgttgagcaacacgttgcataaaatgtgacctcagactagagacctgggcccacagtcccattcatcttcatctgctcgaccagactccatccagtgtgtctcctaaactagacggccagacccctggtcccactcatgccaaatgagacaagctaacttccattctatgtcaccctaaactagaccctggaacccctatcatttcatctcaccctggacaactgatccctaatatctgtcattacaaactaggcagctaacctcctagcccctgtcaccccaaattcaacttcccagtctctgtgccccaggctaggtcctgggatcccagtctttatcccacaaaattagaaaccagaaccccctgattctgccaccccaatctaggcaaagaaacccccacttctgtttcttttttttttttttttttcaagacaagagtctcattctttcacccaggctggagtgcagtggtgcgatcataactcactgcagcctggacctcctgtgctcatgtaatcctcccacctcagtttccccaagtagccgggactacaggcacgcgccaccaggcctggttgatttatttttattttttattgagacagggtcttgctgtttcccaggctaacccccacttctgttgtcccaaactggacatctggaaccccgatctccagcatcccatactatccaaccagatcccagtctgttaccccaactaggcaaccagacctataatggctgcagcctcaaactagccaactggtcaccccaggtcttccaccccaagccaaggccctgatccccccaactggtcaccccaggtcttccaccccaagccaaggcgctgatccccccaactggtcaccccaggtcttccaccccaagccaaggccctgacccccagggctttggtctttagccaaaattagttggccagtcttgtggcctctgtaaccccacccagataattggactggtagcctctggcaccaaagtgagataaccagacctccagtatcagataccacagtggagttcaccagatccccagttactgttgctctaaactggtcatcaaaccctcagtctggtaccccaaaccttaaatttcagtctcaacccagtgtcacctcaaaagagccaagactctacatccaatacccctaaggaggtgccagaagtcccagtcttcgccacgagaaactagacaatcagaacccagtctatcaccccaaaacagaccttagaatctcagcccccatcaccccaacctagacaagaacattagtctctgccacctccaacaactggttcctgtcacaccaaccagatgcaagtccctaatctgtcacttaaagagaactgggctgggcgtggtggctcacacctgtaatcccagcactttgggaggccgaggcgggcagatcatgaggtcaggagatcgagaccatcctggctaacacggtgaaaccccgtctctactaaaaataaaaaaaattagccgggcgtggtggtgggcgcctgtagtcccagctactcggggggctgaggcaggagaacagcatgaaaccaggaggtggaggttgcagtgagcggagatcgcgctactgcactccagcctgggcgacagagtgagactctgtttcaaaaaaaaaaaaaaaaaaattgagaactgaacccattttcttttttaaagacagggtctcccaggctggagcgcagcgtatgatcctagctcactgcagcatcaaactcttggattcaagtgatcctcctgtctcagcctcccaagcagctggaaccacaggcatgcaccaccatacccagctaattttttcttttttctttttttttttgtagagacgggacctcattttttgacccaagctgctttcaaactcctggcctcccaaacagatctccaattaccattaccccaaatcagaaactggatcccaggctatatcaccaaacaagaccaccagattcccaatctgtcacttccaaccagccagctggatcccagactgtcaccaaaatagacaagacctttggtctctgtccccttgatgagacagcaagccctccaatttctcctaccccaaaccaaacctcgaatctcaaggttgttcaggagagacagagaaatggtactgtagttttgtttttatttttatttatttatttattttttctcgagacagagtcttgctctttcgcccaggctggagtgcaatggcgcgaactcggatcactgcaacctccacctcctgggttcaagccattctcctgcctcagcctcccaagtagctgggattacaagcgtgcaccaccacacctggataatattttttttttttttttttaagtagagatgggtttcaccatgttggccaggctggtctcaaactcctaacctcgtgatccgcctgcctcaacctcccaacttgctgggattacaggcatgagccaccgcatctggcaggttttcatatttttgatggagtcttactatgttgcccaggctgatcttgaactcctgggctcaagcgtcttggccttccaaagtgctggaattacaggcatgaaccaccacctccggccctgggaccctagtcttgatcaccccagatggaagcttctggtctcagcatctcaataactcaacaccagaatttgagacctgtagccagttgccttcagaataggcctttggcctgagtaccaacctccccctgacccgcagctctagcctgctgcctcagtgatctcagaactgagtgcttgggtctttggcatcagtagcctccaagcaaagcacctcgatcatattcactgcaaacccagcgatgtagactggacctagcgtccactcaccaacatgggcacggacactcagtctcccctggggaatactggcattgaggtcaacaaacaccctctgctactccaaaattgggattggaaccctggcctctgagtaggcccaggtgacctgacttggccgggggcaccccgggtccccaccctgcctggtgccccaggatgagtccatctctaactgcctccctggcggaagcacttgtctgccctctggtggcagattctggaagtgcactcctgtgtggcgtcaagacacccaggctccccctggtcttcccatcttttgggaagcctgaagcctgggggtcttcctgcttccttccactcacctcccacgcaagtcagccaccaagacctgtccttcaacctcctgaatctctcttccctgtctcgcctctccaccccacttccctgccccatcttccccagctaggatcatcgtccctcgtctcactccctccagcccatccgccacacaacctcagagggataaccctctctgccccgccccgcccctcccctgtccccgttcccctcccctccccttcccctcccctccccttcccctctcctcccctcttttccttttatttttcccttcccttttccccttcctctcctttcctttcctctttcttttttttttttttagagggagcctccctctgttgcccagattgcagtgcagtggcgcgaccttggatcactgcaacctccgccccccaggttcaagcgattctcctgcctcagcctcccgagtagctgggattacaggtatgcaccaccatgctgggctaatttttgtatttttagtagagacagggtttcgccatgttgactaggctgatctcgaactcctgacctcaggtgatccactcacctcagcctcccaaagtgctaggattacaggcatgagccatcatgcccgggctaacttgcaattttctatttaatccgcacaccccccgcccccgccttctttttgagacagggtctcactctgtcacccaggctggagtgcagcggtgatgcaatctcggcccactgcagccttgacctactgggctcaagcaatcctcccacctctgcctcccaagtagctgggaccacaggcatgcgccaccacacctggctaatttttgtattttttgtagagacagggtgttgccatgttgcccaggctggtctcgaagttctgagctcatgcagtccacccaccttggcttcccaaagtgctgggattataggcatgagccaccacacccagcaactcttgtttgtttgtttttaaagagatggggtatctctgtgttgcccaggctgagtgcagtggcagtcatggctcactgtagcattgaactcctggactcaagttatcctcccacctcagcctcccaagtagctgggactacaggcccacactaccatgcccaaataactgtttaacttttttgcagagatgggggtcttgttgtgttatccaggctggtctcaaactcttgggctcatgcaatcctcccaccttggtttcccaaggtgttaggattatacaggcatgagccatggtgcccagccttaatcatgttttttttctttttttttttttttgagatcgagtctcgctctgtcacccaggctggagtgcagtggcgcgatattggctcactgcaagctccgcctcccaggttcacgccatcctcccgctgagtagctgggactacaggcgcctgccaccacgcctggctaatttttttgtatttttagtagagacggggtttcaccatgttagccagggtggtctcgatctcctgacctcgtgatccgcccacctcagcctcccaaagcgctgggattacaggcgtgagccactgcgcccggcctcttaatcgtgtttttaaaagtaaaaaacaaaaggtgaaatgaataataatttaatccactatatcaataaattatccttccaacacacataatcaacataaaaattattattatttttgagacagagtctttctctgttacccaggctggagtgcagtggcacaatcttggctcactgcaacctctgtgtcccaggttcaaacaattctcctgccttaacctcccaagtagctgggattataggcatgtgccaccatgccaatttttttttttttttttttgagatggagtcctgctctgttgcctaggctggggtgcagtggtgcgatcttggctcactgcaacctccgccccctgggttcaagcaattctctgcctcagcctcccaagtagctgggattacagtgcaccgccaccatgcccggccaatttttttgtatttttagtagagacggggtctcaccatcttggccaggctggtcttgaactcctgacctcgtgatccacctgcctcggcctcccaaagtgctgggattacaggcgtaagccaccgcgccaggccaatttttgtacttttagtagacacagggtttcaccatattggccaggctggtctaaaactcctggcctcaagtgatctgcctgcctcagcctcccaatagtgctgggattacaggtgtgagccaccatgcccagcctataaaaattattgagatattttactccattttcatactaaatcttcgaagtctggtgtgcatttcacactcatagcatgtctcagtttggaccagccatgtttgaggcagccgcatatggctggccaccatatctgacaggagaattccagaacagtgggcatcagtgggctctgggtgagcacctgctgcatcaaggatgagtgggtgagttctgctgaggagacacgaggttggagaggctgcatccctgaggccttggcactcgctgtccctctccttgggaaactccacccacttcttgtgtctcctcagagagccctcccagaccacccctatctaaagtaattggcggggcacggtggctcacacatgtaatcctagcactttgggaggccaagacaggtggatcacctgaggtcaggagttcgagaccagcctgggcaacacagtgaaaccctgtctctaccaaaaatacaaaaaaatcagccgggcgtggtggcaggcgcctgtaatcccagctactcgggaggctgaggcaggagaatcacttgaaaccgggaggtggaggttgcagtgagtcgagatcgcgccattgcactccagcatgggcaacaagagcgaaactccatctcaaaaaaattaaaaaataaaactaaaaatacaaaaattagtcaggcgtgttggtgggcacctataatcccagctacctgggaggctgaggcaggagaatagcttgaatcttggaagtggaggttacagtgagccgaaatcacaccattgctctccagcgtgggcgacagagagagactccatctcaaaaaaataaacaaataaataaaaataaaaaaatcaagtcacttcttaggccctctcggccacctcccttgtcttcatctgcctggcactttccctcccaagtgtgtttctcttttgttactgctaccacgtggcagtctccacctcatgatgaaaggcaaactggacccggcacggtggctcatgcctgtaatcccagaactttgagaggctgaggcaggaggattgcttcagcccaggagtttgaaaccaggccaggcaacatagtgagaccctgtctaatgaaaagttaaaaaaaattagctgggtgtggtggcgtgcacctgtggtcccagctgctcaggaggctgaggtgggaggctcacttgagcccaagaggtagatgctgcagtgagcagtggtcacaccactgcactccagcctgggccataaagtgagaccctgtctcaaaaaaacaaaaggcaagaagcaaactgggctggacacagtggctcacaccagtagtcccagcactatgggaggctgcagggggagaatcgcttgagcccaggaatttgagaccagcctgggaaacaaagcaaaatccatctcacaaaagcaaactgtgtctttcatctcaagcagagtaaaacccaaagccctcaccgtggcccacaaggctccctggcctcccacactgtccccctcgcttatctgccccagccacgcccacctcctggctgccctcgagcctcctggctgctgccatctcccaggctatgcccctgtggcttcctctgccccaattattcttcctccaaaggatctgggctgctccctctctcaatttaggtctttggtgaatgtcacgtcagggaggccttttctggtcaccctctttaacccacaactcattcccgaactttctctgtgcagaaaagagttaacctggcaggctccacaacagactgctgtccttagacaggcctgggtgcacagttggtccttggctgggaacttgggtgttggggggggggtcttatcacttcctgatagagtggctcgctgcatctatctaggctgttcgtgcaggcctagagtggcttgctgcatctatctaggctgttcgtgcaggcacaggccttctttctgggagcctggcattttggtatatgttggagagaaggtgctcttgtggccgcccccatgaaaccaagggcgctgaggctaggatcagagtgtccctggctgacatttcacacgtcaccatgatccactgctggaggaattaggtgtggcctctggaagtgcatgcctggtttcccgagttcactccatgcacctttccttttggctgacttggctccataccctttgatgagagtaaatcagagctgtgagtgcaattgcatactgagtccccagtcccagagaaccatcaaacctggggtgctctctgattcctgagtcctaaagaaccatcaaacctgggggtggtctcggggacccccggcacactgtccttctcaactcttttctcctcctgaacactcaccaccattgggcatcccataatattttacctgtttaccttgtcatcgtcttgcccacaccccaggttccaccccaaccctgctctgtgcagtattcccagctccacccatagagacccacagaagatgctgggggaatatttcctgaatgacacccataacagctttattttcaaaggcgggatccctccccgggcttgtgatgggacggcgctgtgggcccgagcagcagagccgtgcaggacaggcatgggcaggggtggggcagctggcccgggaggccggcaggtcccagaagacacctcacacgggttccatctgcagctcctccccgtccacagcctcaatctggtggaaggcagcgtgggagccgatgaccaccagggtggctcctgcaggaaagccggcagctcagggccacactcctgcacctggctcccaccatccaccccagctgctcagaccctgtactcacccagcacccagaagacggccgagcccgcaccagccagccagaagaaggggaaggagatgcctccagccagagcatactgatgcgctgggctcacctctcggcctgggggcagatggcattggggtgctgttccgactctccatgccctctcccagagtaacccctgctgccccccaacaatccgtacaagctccaggttctcgggatcgaatccaaactcctcatgccaaggccctccaggtcctggggtcaccctgttcccctgctgtccccactgccctccagaacacagcacaccgtcctcgcctgcctcagccccaccctctgccctctgccccacatcctccaggaagttcctgggatcccggcttcctgctccctagactagggctctcctgctgcaaccctcgcgcagaccagggtctcaaactggtggcccaagggccaaatctgacctgtggatgtgttttttgagctgttttgcaaggatgtgatttgtggctggcaaagtgaacgatttcacataaaaataccaacttcaggcttctcatagaagtctcagggatggggtctacatgctctggtgacggtgatcagctgaagccaagtcgtgcctgtgcttcaggcactccctccaccccagcccatcaagcacataacttgcaggcccctgaagagcctggccttcaggtctacctaactgtccaatcccaactccctgaccccactccaaaccttgattttcccctggggggaatttcccctggcattttgttttcccagtggtccttggtactactagtctgggaaccacatgaaacatactcctcggcttccctctctaagttccaagttctttctggtcacaccccagaaagcaggaaaagaaacgggaacagatctaggccagtgtaaggtggccacctggtgtccagtgtgggcacctgcagctgatgttggccgcagagagcggcaaggggaggagagagaggggaggagtcatgtggtttgaaaaggagtaggtttaaggcacagcagccaggtggatcctgggtttgaggaatagcaatttgagggggctgagactcgatggaaggatcggttgtgtctgagattttaagggatcaggtttgggggatctagtgtacatctaggcttgggcggacttgggttttgaaggacttggatttggggtctgaggtctgtctgcattccaaaagaccaagatttgagggaccaaggattcatctgggcagggggtttctcaccaaagagcacaagcttggactccaaggtgcgcagatagagaatgtaacaggcgccgaaaaagacagccagagccaccagcaacataggggacgtcaccctggaggaggagtgcagggaggcagcggttagacagctggggctgggccagcccgacggccctggccttctccaccggcgggcggcaagctacatcctggagaccagggagggccaggtgacatttagtcacactgcatcctggccagggtgatggtggggtaggggacctggccctttggtgacaaggtagtctagcagagccaatccttgggggcggggcctgggcggtgagaagagggccctgggcggtgagaggagggaccgggcggtgaagggcggggcctgagcggcgagaggaggggtccagccggtcggggctagtgcgggtgcggggcccgggaggcactcacacacagtacaggatgaggcccaggaacacgaacacatagttgctctggtagtactccacgttgcgtacgaggcgctggcacagctctcccaggttgcggggccgtgagaagcgctgctggtccacgaaggtgctccagggccggatggtcgcgcggcgccgctccagccactcccggcctgcaccggagggaatcagcttcggcagcagggtcctgcggggggtggggccgggtcagtggtggaccgggatggagccccagacccccgcaaaagaaggggactaagggtgcctggactccctcccgggaccccagattcctgtacagcaggcagggaggggactaggggcccagactccagggtcccattagaggagaccggggccaacacttctgcggctcggggctgggactccaggctctcgagggaggagggaggagggggccgggggcccggactcccgggtctctggtccgagggcctagagccagctcgctcacgtgccgctcagcccttccgcctcggcatctttctgctggtccttctgcgctgccatgtctgcgtcgtgaggggtagagctgctgtaaccagcccggtaccctgaagaccccgccggccccgcccgacgccggccccacccagcggagtcgacgtggcgcagccccggagcagctggggactgtagttctgccgccgagtattgtgggagttgtagtcctgacggtgactaagaggatgggcgctatgatggcggtctgactcgcaaaacaccttgggagatataatcccagaaagtgacggcgcgcgcctctgggtattataggagttgtagtttcaggagggtgcatgtgggctgtcaggagcgagggcgttatgggaactctaacggcagaagcgggcgttgtgtactctcccagggaaggcacaatggggaccgtgcagagctgtccttctgactctagagggcataaaaaaacacctggagggcttgctaaaacagattcctgggccctagcccagatgttttcattcagcaagtctggggtggagcccataatttccatttctgagttcccaggtgatgctgatgcccctggtccatggactacattttgagtagaaagatttagataatttgtgggaattgattccttcctcaagagattgaggctagtgagggggccatggttgctggaggggtatctgaggttgccccctgccccaccttgtggagtcccaaagatgaatgagttggggctagggacacctccgaccccgccacacacacctttggagagaagggagtgaagttgggaaagacaaaaggttgagaagttttgtgggcttttttgaaatggagtctcgctcttgttgcccaggctggagtgcaatggcgcaatctcggctcactgcaacctctgcctcctgggttcaagcgattctcctgcctcagcctccagagtagctgggattacaggcgcccgccaccacgcccagctaatttttgtatttttttagtagagacggggtttcaccatgttggccaggctggtctcgtactcctgacctcgtgatcttcctgtctcagcctctcaaagtgctgggattacaggcgtgagccattgtgcctggcccacagggctggaattctaattgaattctaatggggtgaaccagaacagggcctcaagaaatgtgtgtggaagtatagggaagcctgggctcccttaagcagactgggatcctaattttccaaagcagctgggtggggctggaaggaaaatatctatatgggataaccaggtgacctttttttttttgaaaatttttttaagtagataagggattttgctgtgttggcccagtaggtctcaaactcctggactcaagcgatccttctgcctggccttcccaagtattgggattacaggtgtgagccaccatgcccaggttcaagtgacttttttttttttttgagacggagtctcactctgtcgccagggctggagtgcagtggcacaatcttggctcactgcaacctccacctcctcctgggttcaagcgattctcctgcctcagcctcccgagtagctgggattacaggcgcccgccactatgcccagctaattttttgtatttttagtaaagatggggtttcaccatgttggccaggctggtctcgaactcctgactttgtgatttgcccgcctcggcctcccaaagtgctgggattacaggtgtgagccactgcgcctggccccaagtgactcttttaggcccagctcttgtcttccaagatctacagcagtttagggtttgtgctttgaggcctgctggaaggtgttcccaggaggtgggaggaagatggccctgtctgaggggctggtggcgcaataggcagggaagccctttgcaagggccccacactgaagatggaagagttacactttgaagatcagattggctagttactgtttatttcctctttgtcacccccaggcttttagtggaatcaggtttcctttttttttttttttttttttgagatggagtttcactctgttgctcaggctggagtacagtggcacaatgtctactcactgcaacctccgcctctcgggttcaagcgattctcctgcctcagcctcctgagtagctgggattacaggtgtgcaccaccatgcccagctaatttgtgtatttttaatagagacggggtttcaccatgttggtcaggctggtctcaaactctgacctcgtgatctgcccacctcagcctcccaaagtgctgggattacaggcgtgacccatcacacctggcctggaatcaggttttctaaataggattcaaacttgaaaatcaaaggaggactgcggggctgggcgtggtcctgtaatcccagcacttatgggaggctcaggagggtggatcacttgaggtcaggagttcaacaccagcctggccaacatggcaaaagcccatctctactaaaaaaaaaaatacacatgcctgtaatcccagctactcgggaggctgaggcaggagaatcacttgaacccaggaggcggaggttgcagtgagccaagagtgtgctatcgcactccagcctgggcgacagaatgagaccctgtctcagaaaaaaacaaaacaaaacaaaacagaaaacaccaaaggaggagtgcaatagcacaattagccccgagcaggaataggggagcagcatctgaattcaaagggccaaagcagcagaggtagcccttggaagaacctccaccgaaagacagagcttggggaatagaattgggacagagctccagctgcctctttggtggcaggccgtaggagattcaggatggacttttgttatgagagctgttgggtttccttataggaactgaatgaaagcaatttcattccaaaacccactggtctttgttctgagcagagaacatagaggcagaggcctggaggtgtcgaacagcgcaggccatggcaagagacggggagggggacagtggagtctgaggggcaaggacattgcaggaggggtcctaggagtgggagggtggggggggactttgaataagggaatttcaggagatgggacctggacacaggggtaatgtgggagaggagggcctgaggcagagacatcatgagatggtgagaaatggggtccctgagggaaggggcctttggcagatgggccctgaattaggggggtagggggttggtgtgctgggagatgagggggcacctgagaagattgtgagtcccaggccaggtgtggctcacgcctgtaatctcagcactttgggaggccaagatgggcggatcacttaaggccaggagttcgagaccagcctgcccaacatggtgaaaccccatctttactaaacatacaaaaaaaaattagctcggcgtgatggtgcacgcctgtaatcccagctactcaggaggctgagtcaagagaatcgcttgaacccaggaggcagaggttgcagtgagctgagactgtgccactgtacgagaccctatctcaaaaaaaaaaaaaaaaaaaagaaaaagatgggtgcctccagcctgaggactcctccctccctcctgggatccccaaggaagcggtgctgggaaagcaggaagaccttagcacattcagccagaaatgtgggtcactgtccctgctgtgtgacctcaaggaaagccctcccgtctctgggcctcagtctccccacctgtctatgggagcgtctcttcccctgcaccagaaaaattaaacagtatgtgtgggtttcctaggagaggtctgggctcatgtagcccctaccaggaccaggctgtactctggggtcaccaggggtgcccagcgcacatggcccctgccctccaactgcctttccccctcagattcgggagtttctccctcatccattgtcttgtgcagtgggtgtgtacatgcacttgcacactcacccactcacactcactctcagcatcctggccacagacactggcattgggaggcaggcaggcccaggcctggccccagcccctcctctgacttgcctccctgagctgtgttaggaaggctgcctcgagggaaatggattcactgccccaccaaggtggcaaaaatgaaaaggactgacaactcccagtggaggaaggatgtggagcagctgctgcttccttacactgttggatgcagaatggcactcgaactttggaaagggtctggcaacgtccatgaaagctaaacatggtctatcccatgaaccagcaattccactcccaggcacgcgtgtacccaacagagtgcacatctgtcattaaaagacacaactagagggctgggcgcggtggctcaggcctgtaatcccagcactttgggaggccgaggtgggcagatcacaaggtcaggagttcgagaccaacctgaccaacatggtgaaaccccgtctgtactaaaaacacaaaaattagctgggcgtggtggtgcacgcctgtagtcccagctactcgggaggctgaggcagaggaatcacttgaacccgggaggtggagattgcagtgagccaagatcgtgccagtgcactccagcctggtgacagagcgagactccgtcttaaaaaaaaaaaaaaaaaagaaaggccgggcgcggtggctcacgcctgtaatcccagcactttgggaggccgaggcgggtggatcacgaggtcaggagattgagaccatcctggctaacacggtgaaacctcgtctctactaaacatacaaaaaattagccgggcgtagcggcgggcgcctgtagtcccagctactcgggaggctgaggcaggagaatggtgtcaacccgggaggcggagcttgcagtgagccgagatcgcaccactgcattctagcctgggcgacagagcgagactccgtctcaaaaaaaaaaaaaaaaaaaaagacataactagagggctgggtgcagtggctcgtgcctgtaatctcagcactttaggaggctgaggtgggtggatcactttttttttgttgttgttgagatggagtttcactcttgttgcccaggctggagtgcaacggctcgatctcagctcactggaacctccgcctcccgggttcaagcaattctcctgccccagcctcccaagtagctgggattagaggagtgtgccaccatgcccggataattttgtatttttagtagagatgggggtttctccatgttggtcaggctggtctcgaactcccgacctcaggtgatctgcctgcctcagcctcccaaagtgctgggattataggcgtgagccaccgtgcctgttttttgtttttctttttagatggggtctcactctgtcacccaagctgaagtgcagtggcgtgacctcggctcactgcaacctccacctcccaggttccagtgattctcctgcctcagccctgtgagtagctgggattacaagcacatgccaccacgcccagctagtttttgtatttttagtagagacggcgtttcaccatgttggtgggcggatcacttgaggtcaggagtttgagaccagcctggccaacatggcaaaacccagtctctaataaaaatacaaaaactagccgggcatgttggcaggtgcctgtaatcccagctacttgggaggctgaggcaggagaatcgcttgaacccaggaggtgaaggttgcagtgagctgagatggtgccactgcactctaacctgggtgacaaagcaagactccatttcaaaaaaaaaaaaaaaaaaagacatgactaggatgttcctgtccctagcagcaccaattgtaatagccccaaactggaaacccctaagtcccccaacaggagaatagacaaattgtgttatagtcccacaatgggatgaaaaggaaggggccacagatgcaggtgacaatatggatgactcctatagacataatgctgagaacaaggagccagacacagagatcacatgctgtaagatttcatttgtatgaagctcaagaacaggcacaactgatgtgtggtaacagaaaccagatcagctcttgcctctggaggggaggcgactggaggggctccagtgaactttctgggtggagggaaaggttctatgccttgatgtgggtggtagctttgcagatgcaactttttttttttttttgagacgggttctcgctgttgcccaggctggagtgcagtggcatgatctcggattactgcaacctctgcctcccgggttcaagcaattctcctgcttcagcctcctgagtagctgggattacaggcatgcaccaccatgcccagctaagttttttgtttttttgtttttttgtttttgagacggagtctcgctttgtcacccaggctggagtgcagtagtgggatcttggctcactgcaagctccgcctcccaggttcatgccattctcctgcctcagcctcccaagtagctgggattacagatgagtgccgccacgccaggctaatttttttttaatttttagtggagacggggtttcaccatgttagccaggatagtctcgatctcctggccttgtgatctgcccgcctcggccttccaaagtgctgggattacaggtgtgagccactgcgcccagtttttttttttttttttttttgtatttttcgtagagatggggtttcgccatgttggccaggctggtctcgtactcctgacctcaagtgacccgcccgcctgggcctcccaaagtgctgggattacaggcgggagccaccgcgcttggcctgcagatgcaatttttaaaatcattgagctatacccttaagatgcgtgcacttcactgtatgaaagtttatctcaataaaaagagagaatagcgtagtgacctagaactttggacagccttggttcaaatcccagatttgtctcttcttagctgtgtgcaaatcacttcttctctctgtgcacatttaatgcacacttagaagtgggcagagcacatagcaggcactcagtgaatcactgtcatcaccatcatcatcgtcattgtgtcccctgggtcctactcctataggagaggctcccagtcaccatcccacgtctgcttccctccctctcccctgttctgattccacaatgccatcgcctggtgaattcaagctgctctgactttcgtggagttgaaaactccgtgattagatggctctgagattccgtgacttccaagccagtgccaggctaagttcctgcagtttcgagagtcgcctggcagcgcgccccaacagaggggatgctgtcccagccgcagtccccgtctggaaagcaggcacaacacacacaccgcttctctctccccactgatatatttgataattgtccagaaccagagatggcatcagccggggggctgaaggggagtaaaaaagagcccagggaggtggctggggcgggaggaatggatagaggggtgaggagagggagagaaactgacacagaaaagagagaggagagaggtttggggcaggggagagaagccagccagagtgggggcggcaggagatagtggagggggtgggggccaaggtggggccacaggaagagagggctcctccccccagaatacaaaattggggggactgacaggggcggtcctgggcctgggggacggggaagagatgggcgatgtggtggggctgaggtcagtagtaggtttccttctccacccaacctggagagacaaagaaggaaagaaagagacagagtaagagatggagagagacaggcaaggcgagccgcccagcagagagagggacagagagggagagagacaaggaaaccacacagacagagacccgtgagaagacagagtgggtgcccggagagatgggaagagagagaagagtgggaaccaggtggcagagccatccagcagggcgaggggagcctgggaccagctgcctgagaccctgctgccccccgcccccctcggctgccttgccgagctccctcaccccctgggttcctgcgcaggatgagtttgcggatttcgtcgtagacgaagatgaggaaactgtaggggaaggcacagaaccaccagctgggcctgcagaggggagagcaggagggcttgagtgcggggccctaacgagaggcagagtttcaggggactggaggggacgcagaggggcagtctcccaggatccttcgtgctcacaggtggagggtgccctgggcggggctggggcctggggtcttcggagtaatccgtggtgggagcagcctatgggggaggctcgggggcatcagaatggggactgcagtggggacaccaggggaggtggggcctgaggttcaggctgagtctaagggaaggctccatggcaggcgctggtgtgggcagggctgggggcagcggggcactcacttgagagggtacatgcgcagggccacgtccatgccggggcagtaggacaggaaggcagccagggccgtctcctcaaacagcccgaagatcaggatcttgttcctggaggcacagaagggcagggctgggcccagagagcacccaccctgcacctgccaccccgcagagacagggggaggcacagtgcagacacccagagacagcagcacagacacagagacagagaggcagagacatagggagagacagagatggggagacatgccccgacagagagagacaaagatagaggcagagcgatggtgacacagaaagagacaaaagacagggacagacacagagacagggacagacacagagacagacagggacagacagagagacagacacagggacagacacagagacagggacagaaacagacacagagacagggacagacacagagaggcactggtataaaaagaaaaggccaggggcacctccaccacacacacagaggctgagagagaatctaggacacacaggaccccttgagagaaaatcagtgcagtggcaaaacccaaaatgggctgggcatggtggctcacacctgtaatcctagcactctgggaggctgaggcaggaagattgcctgagctcaggagtttgagaccagcctgggcaacatggtgaaactctactaaaaatacgaaaaattagccgagcctggtggtgcgtacctgtaatcccagctacttgggaggctgaggcatgagaatcgcttgaacccgggaggcggaggttgcagtgagccaagattgtgccactgcactccagcctgggcaacagagcaagactctgtctctaaataaataaataaaaattagccatatatgatggtgcacacctgtagtctcagctactcaggaggctgaggtgggtgggtcacttgagcccaggaggtcgaggctgcagtgagctatgattacaccactgaactccagtctgggtgacagagtgagaccctgcctcaacaaaacaacaaaaaaccaaagcaaggacacaagaggaagtacacagacagacagacactcggacaggacagatggctgtccagtcaccatgtgcccccggccctcacttcatgccctgctggaagaccgagttcctccgggtcttgcagatgatcagatcggcccactggacgacaacgatgctcacaaagaaggccgtgtggcaggtgaactccaccaccttcctctgctcgtatgtctgcaggagcggtgaccagggcacgggacgtcagttagtggcactgcagccctagccgccaccccgacgttccggtgctctttgccccgccccatcctgcatggggtcctcagggcctcaggtgtgtcttccttctgcgggctcatagtcccgagggaggagtcaggagacgtacaaggaagaagaaaggttaatggtgatctcaccatccaccaggggccagggaggaggataaggaccctgtgggcctcccaaggaggacagacagcaactgggctttgaagggacagacagaggtggggaagaaggcctggcagggcagagagctccagcagtgggacacaaggctccagatgggctgggccaagggcatccaggaagccccaggtgcccagcaaaggccttgatgctgccatgggagactgagggggccatcgtaggaagtggccatgcatggctggaacagctcaccccggggatcttacggtgggcagagacacagcaccctgccctactcacccactgctgcccgtaactgtcttccaggtcattgacggtgcggtcatcccagttcagccggatgcccaccaggttgccgggcaagaagccattttctgccaggatcacaaagtaagagaagaagccaccgagagcctggatcattcctggaaggaggagagaggaagccgaggagaggctcagattggggccagcagccaacccagggcacctcagagggcccggaggcctccttggagaggggagtatgccctcctggccctgttatctggacattggttcccagagggtgacctgaggtctcacttggtggtgaggccctgagatgggtgggccacctgggacaggggctttggagagagggctctcccagagggataacctggagcccctctctcacctgacctaggccacctaaacatcatgaattcttgggggatccccagcttgagctccctacgcaggaatgacctccctgggcctggaaccactgccatgaagtctctgcttgctgggacagcccccaagggtggctgctccactcctctggggatccgcacacatcaacagcagagaggaggaggtggagaaggatggggtgcagaccccccccacagatagctcactggttggtcctgcccacgtctgctcccctgagtcaatgccagggtcccaagcacccacggtgggccaggcactgctctaggcccggcactgggtggtaaggagatggagtccccggtgcctcaccaatctgcccgtaggccatgctgatgagtctctcattgaccaatttgtccgtccgcgggttcctgggctgtctcttcatgatgtcgctttcggcagcctcgtacgccagtgagatggcagggacctaggcggaggaggccgggtgagccggagaggggaggactccaccctcctgggccccaagggtggctgccagggctcaccatgtcagtgcccagatcgatgcagaggatggtgatggtgcccaggggcagcgggatgttggccatgatgaacagcaggaagggcgtgatctccgggatattgctggtcagggtgtaggcaatggacttctttaggttgtcgaagatcaggcggcctgtggcacaggcaggctcagagcaggcgcccatgccagggagccccactccctctgcccctcctctgccctcatccaacgtcctttttttttttttttttttttttgagacagagtctcgctgtgttgcccaggctggagtgcagtggtgcgatctcggctcactgcaggctccgcctcccgggttcacgccattctcctgcctcagcctcccgagtagctggcactacaggcacctgccaccacgcccggctaatttttttgtatttttattagagacggggtttcactgtgttagcctgcatggtctcaatctcctgacctcgtgatctgccctcctcggcctcctgaagtgctgggattacaggcgtgagccaccgcgcccggcctgtccagcgtccttttctaccccccagcccacccaccattattttctttttgggacagggtctcactctgttgcccaggctgcagtgcagtggcatgatcacggctcactgcaacctcgactcccaggctcaagtgatcctcctgcctcagcctcccatgtagctgagactacagtcacgcgccaccacgtccagctaatttttgtatttttagtagagacagagtctcaccacttttcctaggcttgtctaatttctgggctgtgattccatctcagcctcccgaagtgctgggattacaggcataagtctccacacctggcccctcacccacctacctttccacataaacatccaaccacatcgcctttgtggaaacattcttgaaataaccactttggaagatggtttcggagttgctatcaaacatcccccaccccaccgaccgagtaatccgactcctaggttttatacccaaaagagaggaggactgtttatgcccagcgaaaagcaagtacgagaatgttcaccatagcaccactcatcagagccaaaagccagagtcaaccccatgtccatcaacaggtgagggatgaataaaccacggtacatccatgcagtcaaatactacacagcaagaaggggcgagctacggacacaactccacagctggaccttggatcccgtgctgagtgacacgagccagacacaaaagcattcttagcatccaactccaactggagcaggctcagcacccgtctctgggctaaaagtcaggataatggttatgtctaggaggagggatatagactggaagagagcagacaaaacctaaatggggggctggaatggttttctatcttgactggggtctggtggttgcatggctgtgtacatgtgtaaaaatttatacaccctgtctggttgaatattttaatgagatataatatgcccaactcactgtatgcatgccatatctcaataaatattcaaccagtacaggttgtctaaagtaaacaaaataaagattaatccaggccaggcgctggggctcacacctgtaatcccaacactttgggagaccgaagcaggaggattgcctgagatcaagagttcaagaccagcctggccaacatgatgaaaccccatctctactaaaaatacaaaaattagctgggcgtggtggtgggcacctgtaaccccagctacttgggaggctgaggcaggagaatcatttgaacctcagaggcagacgttgcagtgagccgcaattgtgccattgcactccagcctgggcaacagagcaagactccatctcaaaaaaataaaataaaataaaataaacattagtcaggcacggtggctcgagcctgtggtcgcagctacttgggaggctgaggtgggaggatcacttgaggaggtcgaggttgcagtgactgatgattgcagcactgcgctccagcctgggcaacagagtgagaccttgtctctaaataaataaataagtaaaaagattagcccatgaacaatgaggtcaatcattaagaaagaacaggcgggcacggtggcaaacacctgtaatcccagcactttgggaggctgaggcgggtggatcacgaggtcaggagatcgagactatcctggccaacatggtgaaaccccatctctactaaaacacaaaaaattagctgggagtggtggtgtgtgcctgtagttccagctatgtgggaagctgaggcagaagaatcgcttgaagctgggaggtggaggttgcagtgagccaacatcacgccactgcactccagcctggcaacagagcaagactccatcaaaaaaaggggaggggaggggagggggaaggaaggaaggaaggggaaggaaggaaggaaggaaggaaggaaggaaggaaggaaggaaggaaggaaggaaagaaggaaggaaggcaggcaggcagggacggagggagggaggaagggagggagggagggaagggaaggtgaagcaggctgcctgtggtgtggcttctttgattgctttgatgtctcttgcatagcaataagggcctgggccgctcccacctgatattctcgttccctgcattgtgctcttctccacaaactaggggtttctcatcctaaactatttatggatgaaatggtgacaaatgtgcatcagcataatccagtgtgtgttccaggtggtggggaagaaacaaggtgtgccgtgcgctgactgccgctgcaggtgggatggaggcgcaggggcccactgtgcctttgctttacttttgggtatatctggaatgcccccgttggaagttattttgtttgtttgtttgagacagggtctcggatctcgctctatcccaggctggagtgcagtggcaccatcatggttcatggcagcctcgaccacccaggctcaagtgatcctcctgcctcagccccccaagtctctgagactacaggtgtgcaacaccacgccctgctaatttttaaaattttttgatctttgaggtcttaatttgttgtacaggcaggtcttgaactcctgggctcaagcgatcctcccgccttggtctcccaaagtgctgggattacaggcgtgagcccccgtgcctggcccctgacggaagttaggtatttcttccctcacttcagagaggccttccctgtccaccccatctgggcaggaccctcactattatctatcacagcggcctgctttcttcggggcatatatcacaatttgtaattacatatctgttaacttgtttaaggctgtctctccagccctgtgagaacagggatggtgtctgctctgctcacagctgcctcccaggcttccagcatgatgcacaagattcggaaggagcagacggctgtatctgagacagtgtgtgtactgtgtatgcatagatgtcttggggaggccaggcgtggtggctcatgcctgtaatcccagcaaattgggaggccaaggtgggaggattgcttgagcccaggagttgaagacctcgctgggcgaggtggctcacccctgcaatcccagcactttgggaggccaaggtgcggggatcacttcaggtcaggagatcaagaccagcctggctaacatggtgaaaccccatctctactaaaaatacaaaaattagcctggtgtggtggcatgcacctgtaattctagctactcgggaggctgaagcaggagaattgcttgaacccaggaggtggaggctacagtaagccgagattgcatgcctgtactccagcctgggtgacagagcaagactctgtctcaaaaaaaaagaaagactagtctgggcaacatggcgaaaccccatctctacaaaatcttaaaaatcagccaggtgtgatggtgcatacctgtagtctcagctacttaggggcctgaggcaggaggatcgattaagtcccggaggtggaggctgcagttagccgtgattgtgccactgcactccatcctgggtgacagattgagactctatccccgcccccagcccccaaaaaaagatgtctcttgggagataagaaggtgttaaccatggtttcctctgggatataggagacaagggctgaggacatttaatctgttactctgggctcggctttgccgtttgaattctcttttaccatgaactactttttacaccagagacatttcaaataggagagagaaattggaagaaaatccaccaaggcatgaaccgtgattatttctggatggcgaggttacgggtgattctacttttttcctgaatgcttttctgcatttgtctatgattatcatgaattaatttgatgatcaaaataaatctgaatgtgaaccaacccttctgtggccttgtctgggcctgtcaggaggtggtgcctgtcggctcagcagcaccagcctcagacccagcccctcacaccgccttgcctgtgtaccggttcctctgcctgcgactccctggcactagtctatgtggacgtcacagcatggcccctgacttggctcagccatccctgtccactctgggaagctcccttgacccccagcccaggctggcagagggggtatcccccagggtccctggcttccccctggttgggcttgagaatttttttttttttttgagacggagtctcgctctgtcccccaggctggagtgctgtggcgcaatctcagctcactgcaacctccacctcctgggttcaagcaattctcctgcctcagcctcccgagtagctgggactacaggcaaccgccacaatgcccggctaattttttgtatttttagtagagacggggtttcaccatgttagccaggatggtctcgatcttctgacctcatgatctgcctgcttcagccttccaaagtgctgggattacaggcgtggctgccgcccctggctgagaatatctttaaaaagcctccaagtcagcttcacccaccagatggggcctgggctggatgacgcagggaccctgaagtgtgtcagctcagtcctgcccaggggagctcccgaccccacaggggaggaagacagaaaaggacaggctcaggctcctccagggccagggggcctgtggtctctgccacacatccccctgcagccctggccagttccccttgctggtctcaggcctccggtagtgaccctggtctccagggccacccctggccaactcaccctcctccacccctgtgacgatggaggcaaagttgtcgtccagcaggatcatgtcagctgcctgcttggagacgtcagagccagcgatgcccatggccaccccaatgtcggccttcttcagagcgggggagtcgttcacaccatccccggtcacagccacaattgcaccctggagggagagagggtaaggatgacacccagaggccagtccccagagtcccctccctcagatccagaagcccaggaccccagccccctcctccttcagacctagaagttcaggtccccaacctcctcttcccctcagacctaggagttcaggcctccagaccttcctccctcagacccaggggtccagacccccagaccctcctccctcagacccagaggtccaggcccccagcctccttctccctcagactcagcagtccaggcccccagaccctcctccctcagacccaggggtccaggcccccagcccctcctccctcagacccaagggtccaggcccccaccccctcctccctcagacccaggagttcaggcccctatcccctcttccctcatacccagaagtccaggccccctccctcagacccaagggtccaggtccccagccccctcctccctcagacccaggagtccaggcccccagaccctcctctctcagacccaggggtccagacccccagcccctcctccctcagacccaggaaaccaggccccggcctcagtgaggacccaggagtcaaggccccgtcccctcctctgcgggagcgcagcccacctgtctctgacagccctccacaatgatgagcttctgctggggggatgtgcgggcgaagacgatctcggtgtgattctgcaggatctcgtcgatttgctcggaggtgaagtccttgaggtcggtgccgtggatcacgcaggccttggcatccctgggaagagcagagagagcgatggctgaggtcagggtgtgtgaggagtggcaaagtgatccctgaaagacagagaaacagaggggccagccccacaaccaggagagccagaggaccaggggctgggggaagaggcctctgggagaagcaggggagaagggggctactgcagcagggcgtgcgggcagacctgaggaaggactttggggcagtggatttatttatttatttatttattatttatttatttatttttgagatggagtctcgctctgtcacccaagctggagtgcagtggcgcaatctcggctcactgcaacctttgcttcttgggttcaagtgattttcctgtctcagcctccctagtagataggattacaggtgcccaccaccacgcctggctaatttttttttaatttttagtgcagatggggttttgccatgttggccaggctgctctcgaactcctgacctcaagtgatccacccacctcggcctcccaaaatgctgggattacaggcgtgagccactgcgcccagccaagacacagtggattcagaggaacggagataaatggacaagctgaaggaaggcagagtcagagataggtatgaggatgggaaagttgaagaagtcagaaaaacagaacagaaaagagagacaatgacagacagacaggaaaaaagagagacagacacagaagtactggattctactgaatcctctgagataggaattattagtagcccattttagagatgggcaaactgaagttcatggatgctaaaggacttgcccaatgtcacacagcttgtgagcggtataagctggaatgcaggccgggcgcagtggctcacgcctgtaatcccagcactttgggaggccaaggcaggtggaccacctgaggtcaggagttcgagaccagcctggccaacatagtgaaacccccgtctctactaaaaatacaaaaaaaaaaaaaaaaaattagcggggcatggtggagggcccctgtaatcccagctactcaagaggctgaggcagataattgcttgaacccgggaggcggaggctgcagtgagctgaggttgccccactgcactccagcctgggcgacagagcaagactccatctcaaaaacataaataaataaataaaataaaataaaggctgggatgcaaacctatgcctggctacctctgtggctgcaatgtccccacaccggagggagggccagacccagggcctggtccatggaggagtcccagaaagaatgggacaggcagtgcagagggaggttggggggaagcggtccccctgtgtcaacaccctagagggatgtccagggccctggctgggatgggtggctcaccgggggttaacctggctgacgggaatgttgagccgggcggcgatgtcctccacagtctcgttgccctcagagatgatgcccacacccttggcaatggccttggccgtgatggggtgatcgccggtgaccatgatgacctgcaggcattgttttttagggatggcctctcccgccccacgcctggctttgcctcccccagccaccccaagccacaccttgatgcctgcgctgcgacacttgcccaccgcgtcagggacggctgcccggggtgggtcgatcatggacatgaggcccacaaagcagaggttgtccgtggtgaagttcacgtcatcacagtcgaaggcaaagcccttggggaactgctcctcgggcaggtaataatggcagaaacctagtggcagggaagggttggggtgtgagggtcccagcctcggaacctccgccccatgcccctagatgtctgcatcgcccgcattccatctccccatcagcaagacggccagtcagcattcatttcctaggataccttcccctctcatccatccattcattcattcattcattcatttacagtatattctgggaggccctgggctgagacaggctttgggcagcatcacaaccctccttgccctccagggaccccagagcccgcccggcagcctcgcaccaagcacgcgctcgcccaggccaccgagctcaaggtaggcattctggaaggcctccttcatttcctcgtccagaggctgctccttgccctgtagcaggatggtggagcagcggtccaggatgcgctcgggggcacccttcatcaccagcaggtatcggttgtcgttggggtcctcggtctcatggatggagagctggggaccgatcagagggtggcgtgcctgagccacgcagacaccaggaagctccctgccccatcctgtcccctgtccagagccacgggtgccaggataggcccacaccagggctcccccacactctctcacagagacctctgctcattcctgtccgctctgtctatgtcatggatatatatttctttttctttttctttttttcttttttcttttttttttgagacagagtctcgctctgttgcccaggctggagtgcagtggcacgatctcagctcactgcaacctccacctcctgggttcaagcaattctcctgcctcagcctccggagtagcttgggattacaggcaccaccaccacacccagctaacttttgtatttttagtagagacgggattttgccatgttggccaggctggtcttgaactcctggcctcaagtgatctgccctcatcggcctctcaaagtgctgggataacaggcataagccaccacgtctgtgctcccctcctcccaccctgttttttttttttaagacagggtctcactctgtcacccaggctggagaacagtggcgagatcacagctcactgcagccttgatctcccaggctcatgcgatcctcccgcttcggtctcccacgtagctgggaccacaggtccacaccaccatgcctggctaattttttatagagacatgctctccctatgttgcccacgctggtctccatctcctgagttcaagcgatcctcctgcctcggtctcccaaagtgctgggattacaggcgtgagccaccacacccagctgtatgcttccatttttatgaaatgtccagaataggcaaaaccatacggacagaaagtaggttagtggttgcttagggctgggagtgtcggggaggagggggcgggtgacagctgagagatgtggggtttctttttggaggtgatgaaaatgctctaaaattgactatgtggatggctgcctatatctgcgaatatactaaaactattaaattatacacttagagggacgagctatggtatgttaattatatcttaataaagttattttaaaagctctgagtcaactcctgtctctctttggctgagagccccctggaggcttgtgtgctcctcagagtcacagccaagtcctctccatgcccgtggggcctgacaggatctggccagcacccaccacccccaccacgctccctggctcccagcccctctgcactggctggctggctggtgttcagatgcgtcagcacactcccgcctctgggcctttgcacaggctgtgcctgctaccggagcgctcttcccccagacacctgcagggttccctccctcagcaccacaaccactacgattacctcctcatgcctttgttattgtctgtcttctagaaccagagcgtaagtctcagagaggggtgacttcaccatgtcactcactactgtgtgtacacccagcacccaaaacagggcctaacatgtggtggctggtcaaaaaatgtatactgaatgggccgggcatgatggcttatgcctgtaatcccagcactttgggaggccgaggtgggtggatcacttgaggtcaggagttcaagaccagcctggccaacatgatgaaaccccatcaatactaaaaatacaaaaactagctgggtgtggtggtgcacgcctctaattccagctactcgggaggctgagatatgagaatcacttgaacccagagacagaggttgcagtgagccaagatcacaccactgccttttagcctgggcgacagagcaagactccatctcaaaaaaaagtttactgaggccgggcgcggtggctcatgcctgtaatcccagcactttgggaggctgaggcgggcagatcacgaggtcaggagatcgagaccatcctggctaacacggtgaaaccccgtctctactaaaaatacaaaaaattagctgggcatggtggcgggcgcctgtagtcccagctattctggaggctgaggcaggagaatggtgtgaacccgggaggtggagcttgcagtgagctgagatcgcgccactgcactccagcctgggtgacagagcgaaactctgtctcaaaaaaaaaaaaagtttgctgaataatttaaagttgctgctctgccccaagaggtctcctgcttgttcccactctctgctgtaggaaaactttttttttttttttgagtcagggtcttgctctgtcacccaggctggagtacagtgcgtgatgtaggctctctgcagccccaacctccccggctcaggcaatcctcctgcctcagactcccaaatcgctgagaccacaggcacataccaccacacctggctaattaaaaaaaaaatttcgtacagatggggttttgccatcttgcccaggctcgtctcgaactcctggcctcaagtgatccccccacctcagcctcccaaagttctggtgttaaaggtgtgagccaccgcgcctggcctgcaggaagatctttactcctcagcgtctcactccaacagagatccggctcccactctcaagctctccctgttcctctccccaccaggcgggtattatcattcccattttacagacgggaaaatcaaggctctatgacacctctttacaggcgtcataaggaacctgaggtccaggctggctctcccggaaagcccagagtacctggtatttgttggtggaattgaagggaatctcagccactttcttgttgcgttcacgcatcagcttcacggagccagaggacagctcgatgcacttgagcagggcagactcagacgcatccccagccacatccctctgcaaggagaaagggttgtcagaacagggacagctgaggggaggacacaggcagggccgaggtgaggccagtagctgaacccaccttgagcacagggatgttgtcctgaccacccttgaagacagcgcgattgcagagcccagcgatgtgagacagggccacccaggtgtgcgaactcttgtcaaatgaggtccctgggggaggcatgtgtgagggccagggactcctggagccaggcccccatggtcctcacccggggcctgcgctcacctgactggtcctcagtggtgtcagcctcgtggatctggttgtcaaaccacatgtgggcgactgtcatgcggttctgagtgagggtccctgtcttatctgagcagatggtggacgtggagcccagggtttctacagcctccaggttcttcaccaggcagttcttccgggccatgcgcttggcggtcagcgtcagacacacctggaggacgagcaagggcaggcaagttacagggacaagcccggcagcagggttggatgagcgacacgagggccacagcccagctgcccagcccccagagaatcctgagggcctggaaaagaatgaggcagcacccagcaatgccacccccaattcagaccaatagaaacagggcagagacacccaaagacagggactagaatgctcatagcagccacatgcataatagtgcaaaacagccaggtgcagtggctcacgcctgtaatcccagcactttgggaggccgaggtaggcgcatcacttgagatcaggagttcgagaccagcctggctaacatggtgaaaccccatccctactaaaaatacagaaattagcagggcatgatggtacactcctgtcatcccagctacttgggaagctgaggcacgagaaccccttgaacccaggaggtggaggttgcagtgatccgaaatcgtgacactgcactccagcctgggcaacagagtgagactccaactcaaaaaaaaaaaaaattgtccaaaactgcaaactactcaaatgtccactaacagcagaaaagataaattgtggacaatggaatactaacattgataaaaacaaatacattactgctgcctgcacctgcatgggtgaacgtcaaaaacatgttcagccaaaaagagccagaaatgagttcatactgaattattccgttaataggaagtttgaacacaggcaaagttaatctatgctgttagcagccagatcaggggttacccttgggttggggggcaggggctaaataaggtcttgagggggcttcagggagacgcagtctcgttgcagctgacgtgattctgttcagtttgccccaaatcatcagactatgtgctcacaatatgcttaatcctttgcgtataaaaatccatttgacatagggtagcattcaacattgctaatatggaaaacagtaaactttttttttttttgagacacagtcttgctctgtcgtccaggctggagtgcagtggctcgatctcagctcactgcaacctccacctcccaggttcaagcaattcttgtgcctcagcctcccaagtagctgggattacaggcgcccaccatcacgcctggctaatttttgtatttttagtagagatggggttttgccatgttggccaggctggtcttgaactcctgacctcaagtgatccacccacctcggattcccaaagtgctgggattacaggcgtgagccaccctgcccggccctaatatggaaaacttcacataaaacattaagtcaaagaatgaaagaggagaatggtatttctaagatagtccctgccatgcaccttgaagacagcatttagtcaatatgctcacagctgtcaggcggaacctcacagagaatggacttctggggtgaagctggcagcaaagcagccagagaaaaaatttttaaaaataataataataattattattattataataattattattattattattttcttgagatggagtctccctctgtcacacaggctagagtgcagtggttcaatcatggcccactacagcctcaacctcccgggtcagcctcccaaatagctggaactacagacatgtaccaccacgcctggctaatttaaaaaaatttttttttttttttttttttttttgagacagaatctcgcttttgtcgcccaggctggagtgaggtggcacgatctcggctcactgcaagctctgcctcctaggctcaagctattctcctgtctcagcctcctgagtagctgggattccaggcacccatcaccacgcctggctaatttttatacttttagtagagatggggttttgccatgttggccagtctggtctcgaactcctgacctcaggtgatccacccgcctcggcctcccaaagtcttgggactacaggcatgagccactgcgcccagccttcacattttttggtagagatgggttcttactatgttgtccaggcttgtctcaaactcctgacctcaagcagtcctcctgcctcagcctcccaaactgttgggattaaaggcgtgagccactgcgccaggcttattattttattttatttatttatttatttatttttgagatggagtttcactcttgtcacccaggctggagtgcaatggcgtgatcttggctcactgcaacctccgcctcccaggttcaagcgattctcctgcctcagcctcctgagtagctgggattacaggcatgtgccaccacgccccactaattttgtattttcagtagagacagggtttcaccatgttggccaggctagtcttgaactcctgacctcagctgatctgcccgccttggccccccaaagtgctgggattacagcgtgagccagtgcacccagcctcattattttattttttaacttgatgtactcttcaacttttcatcatgagcgtgcacttcttaattttgcaataggattgttggctctttacggcttgccagtgtttctcaagatttttgtttgtttctttctttgattgtttgctttgttaatgaggccctctgagtcaggcccaagttgtctttcacaagaatactgtgatccaggcccccagccccttctccggacccaggggtccagatcccagcccctcctcccccagacacacgggtccaggcctctagcccctcctccctcagactcaggggtccaggatcccagcccctcctccctcagacccaggagcccagacccccaggccctccccacccagacccaggagcctggccttacagtgacagtggccagcagaccctctgggacattggccacgatgatgccgatgaggaagatgacagcctcaagccaggtgtatccgagaatgagggagaggatgaagaaggagacacccaggaagacagccacgccggtgatgagctggatgaagtgctcaatctcgatggcgatgggcgtcttgcccacctccagccctgatgccagggtggcgatacggcccatgacagtgcggtcgcccgtggccaccaccacgccccgagccgtgcctgcaggccagaggggttaggctgaggtggggtggctcagggaggttctggaggcctgaccccctgggacacatccctgtgtctgccccagctgtgtgtcttctctgcacccgcctcaccttccacacagttggtggaaaagaaggtgatgttccgagtctccaaggggttgtcgtgagtgcagtcgggagagcgagtctggggctcggattcgccagtcagggaggagttgtccacctgggggtaggtgcagcagagagagggttcagtccagggcctgggacaggagggtatttgtgtacagggcttggggctgaagcctgtgtgcctggagatcacagctagaagcctgggtgcccagtgggtgagtggtgtgtgggaggccagaggctgggatcttgaaggtggggaaggcacagtgctgctggccaaggtctagggtccctaaggatctccgaaaggtgagggctgggcctggactcctgactgttgggtgaggaggtggcccagggcctaaactcctgggtctgagggaggagggcctgggggcctggactcctgggtctgagggaggaggggttgggacctggactcctgagtgtgagggaggaggggctgggcctgagctcctgggcagcccgagggagggtaaagccgggccctaggcccaggcccaccttgcagccgtgggctgagatgatccgcaggtcagctggcactcggtctccacccttgatctccaccaggtccccgaccaccacctcctcagcgttcacctgcatcttctcaccttcccggatcaccagggcttgctgaggtgggatggagtaatgtcacctcccagactccctctgcctgggggtcactgggcccggcccccagcccatacactaacacccccgtctggccccttgctgggcacccttcacctggggcaccatgttcttgaaggactccatgatcttggagctcttggcctcctggtagtaggagaagcagccagtgatgatcaccacggccgccagcacgatgcccaggtacagctgtggggagatgtggggatgttgatcaggggccgcccaagccactctccaccagtccctgctcgcctggagtctgggaagggagctttgtgtcagtgggggtctgtatttgtgtgtctgaccctaggttggttatgagggttggtgtgtctgagtctcccctgtttgtgcttgagtccctctttctgtaatggttgtgtttgaatctaagggtctgtcgattttttttttgagacagagtctcactctgtcgcccaggctggagtgcaatggcatgatcttggctcactgcaatctccgcctcctggttcaagcgatcctcctgcctcagcctcctgagtagctgggactacaggtgcatgccaccacacctggctaattttgtgtatttttagtagagatggggcttcaccatgttggctaggatggtcttgatctcctgaccttgtgatctatcaccttggcctcccaaagtgctgggattacaggtgtgagccatctttcctggcatttttttttttttttttttttgagacagggtctcgctctgctgcctaggatggagtacagtggcacaatctcagttcactgtagcctcaacctcccagattcaagcaatcctccctcctcagcctccggagtagctaggactacaggtgtgcgccaccaggcccggctatgttttgtgtttttttagaggctgggtctgtctgggtatgttactcaggctactggaactcctggtctcaagttaccctcctgccttggcctcccaaggtgctgggatgacaggcgtgagccaccatgcccgacttgtccatctgttttgtgtgtgtgtctgtcctcctgcacatgttgagtctgggatgcggctgtctgtccatgtgtctgtctgactggctgcatgcctgactttacattctacaaggcagcttctttggttctctgtgtgtggatctctgtctctgtgtctccagctctgcctctctgtgagagcttatgtctaagactgtttagatttgaacatctgaggacactctctgtgcctgactctcatgtctctctgtcaccaggttatgcctgcattgctgtgtgtgtgtgtgcgtgtcagtgtgtgtgtgagtttctctgtcagtgtatatctgagtctgtgtctgtgtttctgaattaggtggccatgtttgaaaccacatcctggtgtggcatctgcgttgaccctccgtgcacatgcgtgtgtgtgcacacacgcctacccaggtgagcagctctgtgtggctggtgtgtggtctgtgttatgcgcatgggatctgaggctgcatctcgaatgtgtccctgtgttatggggatgggccctgatgtatcagcagcggggtgtgcctgggtctctatgtgacactcactctgggtatctgtcaagccatgaccacctgctggtgtctgttctcaaggccgctgaggtcacacagccttgggacagagccccggctcacacatcctgctgtggggccttggacaagtagcctggcttttctgagcctcagtttgccttgtatttgatctggttctcttgctgggtgattgtgagttagatgggaaaaagggggagagtgggctgtgaaaagcttagagggatgggaagaagttggggtgcggtgtccgtaaataaatgtgcagagccttgcacagggcagggtccaggcactcacgttgtcaccagaggggtcgtcctcggtgcccgcctggataccgtaggccaggaagcagaggatagccccgatccacagcaggatggagaagcccccgaagagctgccggcaaaacttgacccactctggggtggtaggcggtggcgtgagtgcgttaggcccatcccgggccaggatctcctgggctttgctgtgggtcaaaccctgagggacagaggactcacacagaaccctccctgggcaaccctggcaccccaggccttcaccagacccccagaacttaagacaccagccacagcccctcctccctcagacccaggggtcctagcccccagctcctcctccctagttcccagggtcccagcccacagcctggccacacctgcacacagtctgtgttgtatttccggcagacctcttccactgacatcttgtgctctgtctgaggaacaggagtttgggggagacggtgagtgcctaggccagccaagaactggcgaggttctctgggagggtgtgcgggcagagggcgaggcttaccatagccacctccttcttgaggtcatccaggtcccggcgctccttgcccttgttcttcttgggtgagtccttgtcatctttcttgtcctgcgaggtggcgatacgatagctgtcagagccaccagactgcgggcgagaaggggttccaggaggacaccggccctccatgccccagctatcctcctggccggtgcccctgcatctctgggtggggggtctctgtctgcctctcggggtctccctgtgtctcccggagcctctgggtgacttcacctcccttctgcctctggtgactctcaggcctcgtgagtctcatctgctgcaatcagcttccctgtctctggttctgtgtgtctctgagtctctgtccccgaaggtccctgtctggcttctgcctgtgtttcagtctctctctgtttctgtgcccatctttgcggggctctccccttttgtgttctgtgtctatgtgactttgttttcgttttttgaaacaatgtctcactctgatgcccaggctggagtgcagcaatcacagctcactgcagcctcgacttctgaggctcaggtgatcctcccgcctccgcctcctgtgtagctgggactacaggtgtgtgccaccacgcccggctaatttttaatttttttctagaaatggggtctcactacactgcccaggctggtctctaactcctggactcaagcgatcctcctgctttagcctcccaaactgttgggattataggaataagccaccgtgccccacctctatgtgacattttaactctgcttctgtctcttcttccctctccctggccctgtccaaccttcctacatatctgtcttttttttttttttttttttgagacggagtctcgcttagtcgcctaggctggagtgcagtggcatgatctcagctcactgcaagctccgcctcccaggttcacgccattctcctgcctcagcctcccgagtagctgggactacaggcgcccgccactacgcccggctcatttttttgtatttttagtagagacagggtttcactgtgttagccaggatggtcgcaatctcctgacctcgtgatccgcccgtctcggcctcccaaagtgctgggattacaggcgtgagccaccgtgcccggcctcgtatctgtcttttctatgtctccacgtgtatctccatctctttctcctctgtctgtctcccttgatgtgtatctccaggtctgtttttggctcttggtcttattgctttgtttcatcatctctctgtctcctgtctctttatctctccatctctgtatctctgtctttgcaaggctgtttctctctcttgatagctctctctctctctctatcgctctgatctctttatgttgtctctgtcattctctatcctgatcccagtctctgggtctctctgcatgtgtctttctatgattttgtctctctctgatctctggttctttgtctctctgccttgcatgatgtctgtctccatctcttggctgtgtctccccaggtctggctgagtttctgtctctctgggttcttatttccctctgagttggcgtctcaaggatcagtactttctgtctctgtctttttccgtctttcggtctgtctctctctgtcattgtgtctctatcttcatctctcaagctgtctcctctgggatgctcacatctctccctacctgtctcttttcctgtttcaacctctctctgtctctctctctgtctctctaatatctctctctgggatctgcctatctctgtctctctcccactctctctctctgggatctcctctctatctctgaatctctctttctctctcactatcactaagatctcctctctttctctttctctctctctctctccctctctctgtctctctcaaatcttccgtccccctccttccccatatatctctcattctctttctctctctccctctctctgtctctctcaaatcttccgtccccctccttccccatatatctctcattctctttctctctctccctctctctgtctctctcaaatcttccgtccccctccttccccatatatctctcattctctttctctctcttactacctcatcctggaattttcctctctgtctctctttctcccactgtctctctctgggctctcctcaatctctctctctctttctctctctctctgtccatatatatatatatatatatctgtctctttttgtaggatcttcctctctctttcgctgtctgtctctgggatcttcctctctctctctgtctctttctctcactttctctctgggatcttattctctatttctgtctctctgagatctcctctctctgtctctggaatctgcctctctatctctgtctatgtctctctgtctctgtctctctcactgtctccctctggtaccttcctctatctctgtctctgcctctctctgggatcttccatgtgttgggcccatggagcgtccttaacagaggctgggcatggccaggttcctggaggacagagcaggagagttagaggcagaagccctagtcctggcttgaactgcgcatggtgtgagtccctgaagttccagtttgggagcctgggcggatggggagggcagtgtccgaggctggtgggaggggtggggcgaggctgggtgctgcaggggccgctgacaggtcccgcaggcccagggccaagctgggatcggaggctcagcgcggctcagcgctaatctcctcgtgaccttgtagagggcctgagctgcctgctgtctgcccccagacccagaggctgagtcggagggtgggggtgtgcagggaggggcagcagcctggagatctgggagcctcaagaaggggtgcagggggtgggagggaggcttggccccacgccagccctgcagcagcactgcgtctcagatgcggaggcacagaggcttgggggacggggagaccatctttcctactgccctacagtgccggggtggtctcagctttgcccgatggggtagacccaggatggagagacatggagagatggagagatgtggagctacaaaggcctggggtcaagtcctgtgcaggaggccaggagaggggtgagatgggggtcaggagagagagagggagaaaatcagctgcccacccagaaaccttagttgaaggctgggagctgatgctcggggccccataaatgctaagggctgggccggactctcagatactgagagaggctggggtcctggatccctgggtctgagggaggaggggcaggggtctggacccctgggtctgagggaggaaggactgggagcctggaatcctgggtctgagggaggaggggccagggcctggactcctgggtctgagggaggaggggctggggctggacccttgggtctgagggaggaggggctgggcctggacccctgggtctgagggaggaggggctggggcctggattcctggtctgagggaagaggggctggggcctggactcctggatctgagggaggaggggctggggcctggactcctggatctgagggaggaggggctggggcctggactcctggtctgagggaggaggggctggggcctggactcctggtctgagggaagaggggctggggcctggactcctggatctgagggaggaggggctggggcctggactcctggtctgagggaggagggaccgggaccctgggactcctggctcaccctggccctggccttggctcctgcttgcccttgacacagccagacccccttggggagcaggctcccatctgttggagtgcacagctgaggctttcccagtcaaggcaggaggcccagatgggcgcgctgcggggtgggagcacctccaagggtggggaccatgcctgtctcgctgtggccgcctctgcagctccttgccattttccatgctgtccgcctctccctgatctggtgccagctcccgcagcctctgcgcctgggccggcctcccttccccctcgcaggggacctggcccacatctctgaccatccctcccttgacctccccctttgccctctgcctcctcttcctgtccctcaggctgactgtggttgccgctagataggaaatatctgtccttgtgtctcttcctctgagcctcagtttctcattttctctctcaatgtctctccatgtgtctcagccatgtctctctgcttgtctctgtctctttgtctctatgtccatgtctctttctctgtctctttcagagcatctctgtctttccatgtgtctctgtctttccttcccatgtctaagctgccttcatttctcctctcgtccccactccgtttcctaagaccacctccctctaacttccttctctagggcttttagcatcagtcttctcccaatccatccacagcttccctccctccatcccacttacctgacagccatcactgactacccctttctcccttctctcccctagtcctgccccaacccaatcctccttcccagccccccggcccaccctgccccaccccacagatctgcagccccatcccccacctccatccctgggcccatcagcctttatccgccatctttctccccagccctcctattctccctccactggcctctcccgccctcttcatcccacctacccccacccaccccctcctctcctgattccccctcccttcagccccgccccagacacacagggaggaatccagggctgcagcaagggtcaggtggtcagccagggagggaggcggcatctgctggagagactcacagacagacaaggacacacggacacagaggcaaggacacagccaggcatgcacgctccccactacacagttgcacacgcacaccctcagctgtgcactcagtctccccaccgtggctctcctgttcctctcctcctcccagcctcccatgcctgctcccctacatgaggggctgcacacacacacactgcagccccaggctgcgacactgcggagcctgcacacacacacacacacacacacacacacacacacacacacacacacactgcggagtccccccatccaggcctggaaggagaaagagaggtcatctggtgtccatcccacaacgtggacctatccgcaccctgccagggaagcaggggggcctcaataaccccagacgcactaacacgagctctcacagacacacccagacgcgatcgcagactttcagacaccacggggcccacacactcgctgccagggcctgacagagccagcagctctcatacgcacatgcaactgtgcacatgcaaccgcacaaggtcaggcggagatgctgagggctggcccacaacctcgcggatctccgcacacaaagccatgccaacgtgcgccacagaccccccgccgccccctgcggccccacgaccacatggattggctgggtcagccggctccccgggtctcgcaggcctggccccggagcgcaggggtcccggtgcccccgccccccgcgcacacccaatgtcaccggccccacaatgtcacacggaagcggcgcccagccggctcagcacctacccccatcttggcggctccgcggcgagagagccaggcgggcggggcggggacctcggggcgggctcaggctcaggcttgggctgggagcctctgcagcgcccgcgcctcggtaggtgcgcgcgtccgtccgtccgtccgttggtcccaccgcacagaggctgcggcggccgccgcctccgcctcctcatatgcccgcgtccgcgggaggggggcggcgctggccaatcaggggcgccgccgtgctgacggacggcccgcggccccgcccctggtactgcagctgtcctccccttgggctccgcaaagtggcggcgcggccgcgaagggggagcgctgcgggggtggggggattcccagagacctccgcaataggggacttggagaccccctcaatatggagtagggcctccaagaaggggcgctcagggaaagaaaaccccggaaatcctctcattgtgggggtgtgccatcaccgagaagggtacgctgggggagggggggcgggtagtgacacggggtgggagggaagcccggtgaatcactgcagtgtggcaccagggaccctggagacggcggggggtagtgctgttcagggagagggccctgcaggaggggaagttggaagggaacacaagagagcaagaaaggccttgcaattgaggaggggtgctggcgggaggagccctgagattccctcactgtgggtgcccccccactacgcctgagctatccaatgagccacaaccacacagggtacacgggagacacaacacggtggaggatggccccaggaggcccagaaaatgcccagcgtcacagttacacaggaccatcacactgatagcccagatgctggggacacgcacacaccacagggttgcactcatattccaccataggccagcatgtaccctcacacacacaacaccaccccaccacacacagagtctcaaacatagagtgaaacacacatagggcacacaccttacacacccatcacaccacaagagactcataatcacagccacaaagtgctgtgcggactaacaccgacactcagaaaatcgcagactcacacatcacacactctaccacacctgacctcccaccatctcacatagaaacccacatcgtgcaacccataaaccaacacacacctgcactcagcaccatcacacacgcacaggcctcacactgcctccagacacactacatcagcctttgtggacatcgttgcatgatcccacgatgtcgcacacatcctcacacacactgctccccagtgtgtttgggcatgagcaacggcccacagtgcaaagttgccaatgctaactgtgaatgacagacaaaaaggtgcacacacttacacatagcacaataattcaaacacaagtcacgcgacacccacacacctcccacacatacacacatcacgttattgcagcactatcgcagacatctttgttgcacctccaaacacaccccaacgccctcacccacatgacacacagagctcgtcacagtatatgtacacacacagatgcacagccggcacccacaccccaggcctgctgccgacacacaacaccccatcagccaccccactggagcccaagaagttgaggcctccccactcactccaacaccactttgttctatgaggaacaccccagactctccctggggatggtagaaggggaagagagagagagagagacagagagcatttgaccttgtagttttctcagaatgtgggtatcctctccacctatgggataggagatgtgggggacgcaggcaagggacagggagtgagcttggtgtatgagggtgggtgggtgaaggtcgaggacctggtgcagggaaatgtgtgaaaggctgaaggccagagagaggcacagaaacacagagattcagagccacagcatatggacagagacaaggccagagagtgaatggaggctttccccagtgcccagagccccatcccaatcctgtcctctgacccgtccccatctttctcgctgtcctttgttgccatggtaacagggagctgcttctgcagcaaaggaggttgggcctgcagactgggctgttgccatggagactgggaaagggggaggagccacatcttttaacccagatgcctcacccccagacgccccctccccaactctgccctcttcctaggggagggagagcctatcaacatatcctcctttccttctcttgacaccttggcctagaggcatgggcctggaccatggagaatgggactggggagatggggaagcctggggaggtgggggaggcctggattccaggagattctaggctctgtctgctcttgctctccagctgggccgggggaggccttgagcccttcccatcccacctcagacacaagctcacgtcccccctcatgcactctctcctcaggcacgagcctgatgagactgatgactgtgcatcgtgctcctggtgaggctctgcagaagtagggggggcggtgagaaggaaagacctgggaaggtcacagggataaaggggaataggggagctagatgtgagaggcggaaggagagacacagagggagaaacaggcagcccagaaccagagagaggcggatacaaacagattgaaaaagacagacagagattggcagatgcagagatgagaacacggagacagagcaacggaagagttcagtgaaggtgacagagacagagagacgtagacagccaggcagagacaggcttggtaaaccagggagactcagagataaaggccagggggagactgagcagaaacctggtaggggaccggggactcagaaatgggggagaccccagagggaattggcctcgaggcattgggacagagaagggggagaaaccagaaatgtctgtaatcatgttctagtcacctcgacaaagagtccgacccaagggcagagacattgattggagtgtgtaagagacgtggagatagagatgcgagacaacagagagaggctggtgcctgcccccacacctgtccgaggggcacgcaaccagggtctgagacgcagaaggggacgggtggcgacggggggcgctgtgtgcggggaggggtctcccagggtgtggccggcctgccaggactgcgctgggcaggcgggccctggagggaagtcgggcgctctgggctcaggctggccaactgggtgctgaacggacagctcccaagccccgggccgccgcccaggaacgggcgcagcctcgctctctctgggacctttccagtcaggctttcctttccgttccagtcccctccaggttccatttagttttttatggcttcctgtctctcaccccaactccgggtgtatcttaccctcccgcttcacctctggtctcagccctctattctttctccagtcttctctcacctcacccagcctctctccctgtctcgccggctctgtgtcctctagctctctctccccatccccctcccgcccactctgcccccttcgttgtctctccccatctctgtctctcgccatccctccatctctccctttctgctcggcctcgttttggctcttgctgtgtgaccttcactcgtccttcctcagctgcagtttccacagaaacctccggcggggcagggagggcggggacagaaggcggacccacctttctcctgcgccatcagcccttcagcctctcccacccctgcccgcccacccaccccccagtctactgggattcctcacttcctctcttgggggttggggaggtacattttcaacagaaacacgggatcacagccacagacagttgaagatggcctcgcagatgcgtgcacacacgatcacaacgtcactgaatcaccccggcccaggcacacactcgccaccccaggcacggccacactcaacagctcactggccctcccctcccccagccccatctgttttctgtctttctgtgtctccgcttccggtgtctccgcgtctccagatccctgcatctctccatctgtctcagggtctctgtcgcagcctccctctgtcctgagagaaggtcagtggagaggggccagctgctgggacccgggctggcctgcagcctgtaggcagggctgagggtggagagagcatggaagtaaccatcgaggctcactctgattctcagcaggtgccccggggacccaagcctccaaagccctcacacccccaggaaatgagagacggtatccccagttctggggttttgttcttttttttattccaacaggggctgcgatgtggcaaggggagggatgggggcccaactgaccccctccctgggggaggtctcatagaaattccgaggtttctccccccaaaaaagagaggaagagaagagtggaggggcaccaggggacacccatctgtccagaggccctccccacctccagaagcgtggggggctgcgtcaagtcttggggagcctgagcagtcccagaatggggtcctctccgctgactgctttccgcttcccagagccgcccccgaagtccccagcccctggagtcctcggttcctgcgcccttctcgcccgcggcaccctctcgcgagtccactggggggcgcaggcgggctccagagccaggcctcggacttcgcggggaaccaaaggcaaaatcgcggcgtccggggcgccggcgcacaagtcctgtcccgcgcccgctgcgggagcggagactgctggggcctggggcgggccccgtcccttcggtcagtccgggcgcccgcacagccccgcccgtggtcactcgtgctccgccagctcccgggggccggcggggccaggccgcggccggggcgggctggtggcttcggcggggacgcccaggccacgcggaggcgcgccggcccccgaggcccgcagcgcctggatgcgccggcactcctggcagacgcgcacgtgggtgcagggggtgggggcggcgggtcgggctccgctggggggccccgggtcgtccaggaggcgctgcgggcccccgtgcgcgctgcccgcatccccgcccgcgccggccgagtagagcttgccgttgctgaggcgcatctcgcggaccgcgcgcagtgacagcagggcccggctcgggccgcccgggcgtcggcgccggcgggaacgcgacgtcttgcggcaagaaacggcgtggcgcagctcctgcagcatctcctggcacaccgacacctgggggtggcgcgggcggtcaccgtcccggcgcagtccgcctcccgcctcccccagcccctctccacatcccactcctcctcctcctttcctcgcccgggtctttcttccttctgccctcgcttcccttcccacttctcttccctttatctcccccgtgttttctgcctcccctctccacctctccccacttatcttcaatgtctccattctactctgcgtttgttcctgaatctgcccttcaccttccacctaagctcctctctttcctctggtcttttcactgtctctaaattttctccagttcttccttcctgatttcccatcttctgcccctcatccatgcgttcattattgcaaggcatatttacctgtggcctgctgtgtgcccggcactgttctgagcactggggatatggcagagaaggaaacagacagaagtcccagccctcgtggaggttatgctcaagtgtgcagagacagaagataacagacatgtatgtagtgtgttaggcgtggtgagtgctttggaaagaaagaaaatcgggaagaggcctaaggtgtatgggtagggagtgacgatgaattctgagacaggacagtcaaggaagacctcactgagagaaggatccttaaataaagacagggtgagccactggagacctgggaagccagcctgctggacagataaccgggcagggccgaaatgcccaggtgggagtgacttggcacgtctgaggcactgcaagcaggtcagcatggctggaggggggcgtgcacagggaagacagaaaaatgaggtcaaaggagcagtggcggccagctctggtaaggcccataaaccactggaaggatttttggctttcattctgaaaatcagaatgagagtcagacgggaatcactggggagctttaggtagaggagtgctgtgttttcataggatcactctgtgttgagaacagattgtagggaggccaaggcaagagcagggagctcatggaggaagctatgacaataacccgggcaggagatagggatggctggaccagagcgacctgagaaaggtctggattctggatatattctgaaggtggagccaataggatctgctaagagatcagatacggggcatggaagagagagaatagtgaaagaaagctccaatattttggcccgagcaactggaaggaccaaattgcctcacaggtgggcagaagcccaatgttggacacatcgcatcacgtgcacacctatcagatatccaagtggagataccaagtgtggagctgaagttgcagaccttggcttcaggggagacacatatttgtgggttaaggcaggcagccttcaagatcccacctcccgcgtccacgcccctgtgtaatcccctctgacactgtgtcagagctggtctgtgtgaccaacagaataagtttcagccattgcacattctgcttccgccttgctctctctgatcactcgccctgggggatctcagctgccatggtgtgaggacactcaagcagtccttggagaggtccttgtctgaggaactgaggcctcctgccaactgccatgtgagtgtattcatcatgttttttattttctgtgtcttaggatgttttgacactttaaacatcttgcaggctggggagagactacccctcccagaactagccaagccttagagatagcagagggctcagctgcctttcatgtgcaaaccaaccaatctatacccccaacctccccctttacctaactctcacataccaagccaatattcttcctgacctaaatcaacccggggccaggtaccagataagtagggacagcccctatagcccagagtccactgacattatccaaactggtgaatcgtaagctgtttccccttctcctgggaaatgttaaagaataaaaatcatttttctttctgtttctttttgagacagtctcactctgtcacccaggctggagggcagtggtgcaatctcggctcactgcaacctccacctcccagattcaagtaattctcctgtctcagcctcctgagtagttgggactacaggtgtccaccaccatatctggctaatttttgtgttttcagtagagacagggtttcaccatgttggccatgctggtcttgaactcctggcctcatgtgatctgccctcctcagcctcccaaagtgcttggattacaggcgtgagccaccacacctgggcaaaaatcatctttcaatgaaattggtctccatgttgtcacttggccacctccagaaactaaaatcccatggggacatttgggacagtgagccatcttagaacggaaccctccaccctttgttgagccttcagaccacagcagtctggccaaaaaacatgactatgacctcatcagagacccatggcagccagaaacatccagctaagctgctccgaggctctggacccacagaaactgtgaaccaatggaagctggctttttaaaagctgttaaggtcatttgttatgatagcaatagataactaacacaagaatcaccagcacatagtgggtcttaagagccatttggctggtgggatcattcaagtagtggagaaagaccgagaagagaagcagtctaaggactgagccctggagccccacaacaaacagagcctggggagaaagagaaacccaacgagggagcctgggaaggagtgaccggagaagtgggagaaggggaagaaggggctttgaggattgagagtgactggctgtgccgaagcccactgctacctcatatacatgaggcctgagaccgggaatttcagacatggaagttgctggtgacaagagtggcttcagtggagtggcagggaccgatgccagactggagtggggggcaagaggaaatgggaggaaagaagaaactggaagcatcagggagaccccccactgctgccaaggctgtaaagagaagggaagaaagtgggcggtggctgggagggaaagtgaggtcaggagagggtttaagactggagaaatgacagcatatttgtacgttggtggcctgaatccaataaagagaggacaactgatgctgcaggaggaaaggacagacttgccggagggatgtccttgagaaggcaacctggacacgggtggagggcacctttactagcagcatggacggctccttcagaggagtccttgggccaagtgcagaacactggcaggcagctggatgcagagctggggtctggggagtagatgtaaggtcagccgctggatgtgaggagggggaggaagggctggaggctgacagagagaggggaagcagggaaccagcagtccaggggtgcaagagcacgaatgggtctggaaatgcaggggtgtggctgggcggcccccagggacatggaagcagccctcctgaacacagtgtgggaccagtccagggctgtgtcctcttctggttccctctgtcacccaggctggagtgcagtggtgcaatctcagcttactgcaatctccacctcccgggttcaagcgatcctcccatctcagcctcccgagtagctgggattacaggtgtgcaccaccatgcccggctaatttttgtatttttagtagagatggggtttcaccatgttggccaggctgatcttgaactcctgacctcaggtgatccgccagcctcggcctcccaaagtgctgggattacaggtgtgagccactgcacttggccctgtttctcttcttatttcttcttgcttttctgcctctgtggctccccacatcctgtccctcacctcctctccctgcatcctcattgctccctgtgcctactttccctcctgttcttcctcacgcgctgattctctggccccatcagctctcttacttccccacctcctgcattcctctgcccccttctcgcgatccccaccaccctccaggtatggctcccaatgccacaatcttcacgcacctcagcccctgggggtccctgttcctgcccacccccacccccagcctcctcacctcctcggactcagctgacctccgtgtggaccatatgaattccatgaccgccacgaagacagcaatgatgaggccacagatgagcacgataaaaatgccaccaatgttctccatgcccaaacctggagggcgaagggagttggggggcaaagggagttggggctgtgtgggaagggggctgggagggggctatgggaaggggacaccatacgcgggaactgacctttagctcgatggtcctcctccttggggcaccggcccccctcccaccacttgcgcttcaggatctccagccggttgttctcctgaagctgcaggatggccagtgtgatctcatcccggaacggggagcctgggcaggcacacgaggggctggaccagccatcgggccctgcagccctgaccgccccaaaccccaaactgtgccctcaccacggccttcccccgcctctaccacgtgcccagggtcttccctgcagcctctcctcacccccagcccagtctcctctcaacacagcagccagagagacagtgttaggaagagtcagaggccatacctttcctgtgctcaggactctccatggcttcctgttgcaagctcctcccctcggccactctcagacaccctcacccccacggctctcagctccagcctcatcagcctcctggctgctccccaaattcatcacacacagtcctgtcttaggacctttgcctctgcctggaatgtccctctccgcacttcatccaggtctctgcccacatgctggctccccagggagtctattctgatgactttatttaaaatggcaccaagcgccccactccctgtcagtgtcttccctttaatttactttggagcagctgtcaccacctaacactgtattatatggctatgtgtttatcatctttcgtctgcatccagtgcgggacttggcatgcagttggacaccagacgaatccccatccacacctctccctggaccacctctcctccccaacctcacatcctgcccttaagccatccttgggcttcaacaccccacacaccctattctatacttatttcttcattgactaagatacttcccgaccaactaccacagaaccagagacacgggcagatgaaagtgattaatatctaccaggcaccaactgtgtgccagaccctgggtttattcaggtcttatgatgatcctgtgggacaggtatcccacctgaggcaagtgtttctgaatgacgaaagtgatacacttgcttaagactgtgcactgagtcagggaggaaactgagatttcttcctttcttttgacagaatctcacttggttacccaggctggcatacagtggcatgatcattgttcactgccacctccacttcctgggctcaagcgatcctcctacttcagcctgtagctgagactacaggtgcataccacacctggctaattttttaattttttgtaaagacagggtcttgctatattgcccaagctggtctcaaaactcttaggttcaagtgatccttccggcttggcctcccaaagcactggaatcataggcataaaccacagtggccagccggaactgggatttgaatccaggtcggtgtgactcctgagcctgtcctccaagcaccaagctacactgcctccctggcaccgactcacctacaaagctgctaagatctggggcaatttgctatgcagtaatagataactaatacaggtgtcatcagtacataaatgattttaaaagccaaaatgccaaaatttggtgacaatttggtcgtgagttccaccactgagtcctggaaaaacatgtcctgggccatgcgaggtggctcatacctgtaatcccaacactttgggaggccaaggcgggcgacagagcaagactccgtctcaaaaaaaaaaaaaaaaaaaacaaaacaccaaacttgtcctgaaatataaataggcacatacaagtctccctaccagatcattccatccttcccatccatcttacaagcatttttcaagcacctgctctgagccaggctataggatttttccaagaaataggaaacaagaccaggtcctcacccccacagggcccttgggggaagacagcaagccccaccacccacatatactgaattgtatacacagtctcactgaattctcccaacagctctgggagggctggattgctgctaggcctggttttgcaggttgggggtacagaggctcaggacggtgatgtcgcctgcccaagaccatacagccaggaggccacatgcaacacacccagcctgcctcgggggtgcctggcccggtcctgggcctgctcacaggtggttttggatgcccacggccctgctgtgttccacaccgtgctgtgccgtacccagcggcatgccaatgccgtagcccttggtgtcgaggagtcccccgatctgggtgaggttgcagttgaggcgccggtggtattcgttcatggtggactcgagcaggaaggcgtagcgggagttgaggacgcgggcaatgccctcttctgtgctcttgacgaacacgctgggctgcttcgactgcatgtagttccacatgcgctggtacgtttggtaccgtgaattctgggcaggaggatcacaaggggaagatgggagggtctttccagccgcttcctttccccgagcccttcccatcctccaggaagtctccctcaacccaggagaatgcaaggtgatcaaaggaagacagagccaaaggtagaggagagagaggagatggacaaactgtccaggccaggtccaagtcatccccacagccactgtgcccaccacccacctggggggcccggtgagtgcacctccacctccttccccttaaccctccagccggtggccgctgcccaactcaggcctcctttagaccactaggacctccctgccaagcttgctttcctcttctttccttcccaccaccccaaaatacaaaagatcaagcacttttcaccttgaagggccttcccttctctctgtcagcccatattcctggtcccgacccttccagcagcctccttgatcccatttggcccatatgacattgacatttgataccacatatgcctccctgccctcattccccagttccctagccagccagctgcgagccccatgacagcacatgtgtgttttctgctccccagcctccaggctgtcactgacaatcagtccctctgacccaggagaccctgcccagacccatcctgagctgctttgcatggcagggatcccaacaccacgcctgagaggttctggtggccccacctggaagaaggtcatggtggagccggcgtggatggtgccatactcgatgttggtctgatctgccaggtcatcggccgactccacaggcacctccatgcgctgcacggtgaggaaggcggccaggttggccgtgtaggaggagatgatgatcaaggtgaaggcccacctgaagggtgggaggggtgagtcacgggctggagtcacccctgctgacctgcccccgtggccatgccccccattggtggtgcccctcccaagtgaccccagcatctggaagactcagtgactgctgggtgcagaagcggggagtgtggattctgaagccagacttcctggttgtaaatattgcatccggagacttctacttccagatataaaagagtaagatggtctggaaataccctcccaccataaacagctaaagagctggatagaatacaggaaacttttttcttttttttttttttttgagacagatcttgctttgtcagccaggatggagtgcagtggcacgatctcagctcactgcaacctctacctttggggttcaagtgattctcctgcctcagcctcccaagtagctgagattacaggtgcccaccatcacgcccggctaatttttgtatttttagcagagacggggtttcaccatgttggccaggctggtctcgaactcctgacctcaggtgatccacctgcctcagcctcccaaagtgctgggattacaggagtgagcgaccacgcccggccaggaaactatttaaaacataggacaagagacatcatagaactgtgatccctgagaagagaaacaaaatgagtcttattgtccaggctgcttggctggatttaatttataggaagggaagcccaaacagcccagcaatcctgctgagttgcagagacggagactggtgatcaggcaggccaacatggctggaatttgggggatagagtgcctgagaggagggagctgcaaagagagggaggattcagaaaccggtggtccccttgagtctttggctgaatatcaatctgtgcatgcatggggtgaaactctgtggggctggacaagagcaactttcaaggagaaaacaattcttagagttgacacagggctgagagtcttttgagctccctgcagccagagtagaaagatttcattgaatacatgagacattcagtagagacccaaaagtgtaacatactagaaataggattaagttagccctagaataaaggcaatgctaaagctgcactaaaaaagcttaaaaacaggcctagaagtatcaaagtaattcacaagtaacctaactagattccagaaaaagtttataaatactctgtaaaaaaatatattcagcaatgtaaacaatgtctgttatgtaatttttttttttttcttgagacagagtctcactctgtcacccaggctggagtgcagtggtgtgatcttggccactcccgggttcaagtgattctcccgcctcagcttcctgagtagttgggattacaggcacctgccagcacgcctgactaatgtttgtatttttagtagagatgaggtttcaccacgttggcaggttggccttgaactcctgacctcaggtgacctgcccacctcgcccacccaaggtgctgggattacaggcatgagccactgtgcccggcctattacataattttttaaaaaaataccaggttgggcacggtggctcacacctgtaatcccagcattttaggaggctgaggtgggcggattgcttgaggccaggagttcaaggacaacctggccaacatggcaataccccgtctctactaaaaatacaaaaattagctgggtgtgatagcacacgcctgtgatcccagctacttgggaggctgaggcacgagaatcgttggaatccaggaggtggaggtcgcagtgaaccgagatcaccactgcactctggcctgggcaacaaagcaagactcttgcctcaaaaaaaaaggaccaggtaaacaaaggtgcaggaaaatgtgacctataaccaagagaaaaatcactcaattgaaacagacccagaattgacatagatgatgacggaattagcagacaaggacatgaaaacagctattataaatacattcagaatgctcaagagtataaagaaaaacatgaacgtaatgaaaggaacagaagatataaaaagaagtgaacagaacttttagagaatgatatacacatatctgaaagaaaaattttactgaaagggattacacagattagacaccggcagcagaaaagatgagggaatttgggccaggcacagtagctcatgcctgtaatcctagcacactgggaggccgaggcaggaggatcacttgaggctgggactttgagataagcctggtcaacatagccagaccctgtctctacagaaaaataaaaaaattagatgggtgtggtggtgcctgcctacagtcccagcaacttgagaggctgaggtgggaggatcacttgaggccagaagtttaagtctacactgagcctggtcgtcactgcactctagtctgaatgactaagtgagaccttatcgttatttttttattttatttatttatttatttttgagatagagtctcgctctgtcccaagctgaagctggagtgcaatggcgcgatctcgactcactgcaacctccgcttcccgggttcaagcgattctcctgcctcagcctcctgaatagctgggattacaggcacccgccaccatgcccagataatttttgtattttttgtagagatggggttttgccacgttggccaggctgagaccttatctttaaaaaaaaaaaaaaaggctgggcgcggtggctcacgcctgtaatcccagcactttgggaggccaaggagggaggataacctgagttcaggagtttgcgaccagcctgactaacatggcgaaaacccttctctactagaaatacaaaaattagccaagtgtggtggtgcatgcctgtaatcccagttactcaggaggctgaggcaggagaattgcctgaacctgggaggtagaggttgcagtgagctcagattgtgccaccgcactccagcctgggcaacagagtaagactttgtctcaaaaaaaaaaaaaaaaaagccaggcacagtggctcaggcctgtaattctagcactttcggaggccgatgggggcggattgcctgagctcaggggttctagaccagcctgaccaacatggagaaaccccatctctactaaaaatacaaaattagccgagcatggtggtgcacgcctgtaatcccagctacttgggaggctgagacaggacaactgcttgatcccaggaggtggaggttgctgtgagctgagatcacgccactgcactccagcctgggcaacaagagtggaactccatctcaaaaaaaaaaaaaaaaagattagagaatttgaagaactgcaatagaatctatccaaaataaagcacagaaaggaaaaagtgatgaaaatgagcacagagcctcaatggcctgagaaataagtggctttacctatgtgactggagttccagaaagagaggagagaaagggataaccaaaaaaaagtctgatgaagtaatggcctacaacttttcaaatttgatgaaaaccataaacttgcagatgtaagctccataaaccccaggtaggctaaacacacatatttataaaacgcaccaagacacattataatcaattgctgaaaaccagcaataaagagaaacatcttaaaagcagctagaaggggggaaacatattacattcagagaatcaaagataacagtgccagtcgacttcttgtcagagagtgtgcaagcccaaagatgatgcaacatgctgaaagaaaaatcaaaacaaactgtcaacctagaattccacagcaggcaaaaatatccctcaaagaagacacactaacacatttttcatacaaaaccaaagctgggagaattaattgccagcagacccgcacagcaagaaatattaaaggaagttctgcaggtaaaagaaacacaacaccagatagaaacgtggatgtaccagaaggggtgaagggcaccctcttcaaatggtagatttgtgggtaaatagaaaagatatattcctcactttcaaatttccttacgaagcatttagtggtttggttttgtttttgagacagggtcctgctctagggtggagaggcgtgaacacagctcactgcagcctcaacctcctggacccaagcaattctcccacctcagcctcccacggagctgggaccacaggcatgcatcaccatgcctggctaatgtttcttagtttttgtagagatgaggtctcgctatgttggccaggctggtgttggacgcctgggttcaaggaatcctccagcctcggcctcccaaagtgttgggattacaggcgtgagcaccacacccagcatttactatctaacacacacacacacacacacacacacccctaatgtattgtggggttcataagatatgcagagctcaaaggacgggagggtgagaggaacatatcatgttgtcaaggtcttatatcttacgtgaaatggtataatgttacttgaaagtattttgtggctgggtgcggtggtttacgcctgtaatcccagcactttgggaggccgaggcaggaggatcacgaggtcaggagatcgagaccatcctggctaacatggtgaaaccccgtctctactaaaaatacaaaaaaattagccaggcgtggtagcgggcgcctgtggtcccagctactcgggaggctgaggcagaagaatggcatgaacccgggaggcggagcttgcagtgagccgagatcgcgccactgcactccagcctgggggacagagcgagactccgtctcaaaaaaaaaaaaaaaaagtattttgtaataaattaaagatccatattgcaaacccagaaaaccactaagaaaaataaaacaaagaagtacagttaacaagtcaagagtagagataagcagaatcttgaaaatcccaacaggccaggcacagtggctcacgctgtaattccatcactttgggaggccaaggtgggcaaattgcttgagctcaggagtttgagaccagcctgggcaatgaagtgagatccggtctctacaaaaaatttaaaaaattagctgggcatggtagagcgcacctatggtcctagctacacaggaggctgaggcaggaggatggcttgagcccaggagtcgtgttcgtgccactgcactccagcgtgggtgacagagtgagaccctgtctcaaaaagaaaagaaaagaaaagtcccagtaaccccctaaaggtagaaaaagaggaaaaggggaacaaagaacagatgggacaaatagcaggttggtagatttaaacctaaccatatcagtaattacattaagggtaattggtttgaaccagcggctggctaactatggcccacaggccaaatctgacctgctgtctatttttgtacagccccataagctaagaatggcttttacatatacatatatgtatatgtatatatacatgtatgtgtatgtatgtatgtatgtatgtatgtatgtatttatttatttggagacagagtctctctctgttgcccaggttggagtgcagtggcacgatctcagcttactgcaacctctgcctcccaggttcaagcaattctcctgcctcagcctcccgagtagctggaactacaggcgcacactgccacgcctggctaattttttgtattttagtagagatggggtttcaccttgttgcccaggtaggtctagaacccctgagctcaggcaatccgcccgcatcggcctcccaaagtgctaggattacaggcatgagccaccacgcccggccagttttcacatttttaaatggttaaaatgaaatcagaagaacaggctgggcgcagtggttcacacctataatccgagcactttgggaggccaaggtgggtggatcgcttgagcccaggaattgagactagcctgggcaacatggcgaaaccctatctctacaaaaagttagccagactgggtggcacgtgcctgtggttccagctactcaagaggctgaggtgggaggattccttaagcctgggaggttgaggctgcagtgagccaagattgtaccactgtactccagcctgggcaacagagtgagatattgcctcaaaaaaaaaaaaaaggaatattttatgacacatgacttatataaaattcaaatttcagtgtcagtatccataaataaagttttattggaacacagccacactcattcatttaatgtatcatctacaacagcttctatactacaatggaagattgagtagctggaacaaagaccatatgatcaacaaagtacaaaatatttacttagggccagagcagtggctcatgcctgtaatcgcggcactttgggaggctgaggcaggaagatcgcttgaggccaggagttcaagaccagcctgggcaacaaagtaagaactctctacaaaaaaaaaaaaatgaaaataataaaaaattagccaggcacgtagtcctagctactcagtaggcggaggcaggaagatcccttgagcccaggagtttgaggctgtagggagctataaacacacagcactccagcctagagacagagcaagatcctgtctttaaaaaaataaaaataaagataaatatttaaaaacatctttttttttctttttttcttttctttttttttttttttttttgagatggagtcttgctctgtcgcccaggctggaatgcagtggggcgatctcggctcactgcaagctccgcctcccaggttcgcgccattctcctgcctcagcctccggagtagctgggactacaggcacccgccaccgcacccggctaattttttgtatcttttagtagagacagggtttcaccatgttagccaggacggtctcgatcctctgacctcgtgatccgcccacctcggcctcccaaagtgctgggcttacaggcgtgagccaccgcgcccggcctaaaagcatctttacttagagaaaacataaatgtttgaggtgatggatttcccaattaccctgatcccagcatttcaggatgctgaggtgggaggactgcttgagcccaagagtttgagaccagcctgggcaacacagtgagacttcgtctctaccaaaaataaaaaaatttagccgggtgtggcgtcgcacacctgtgatcccagatacacaggaggctaaagtgggaggatcacttgagcctgggaggttgaggctgcagtgacctgtgatcacactactgcactccagtctgagtgacagaacaagactccatctcaaaaaaaaaaaaaaaaaatcacctgtactcccaaaaatatgtacaactattacatataaataaaatttaaaagaaaaattactggccagacacggtggctcacacctgtaatcccagcactttgggagtctgaggcgggtggattgcctgagctccagagttcaagaccagcctgggcaacatggtgaaaccccatctctactaaaatacaaaaaattagccaggcgtgctggcgtgcgcttgtagtcccagctacttgggaggctgaggcaggagaattgcttgaacctgggaggcagaggttgcagtgagctgagatcgtgctgttgcaccactgcactccagcctaggcaacaggtcaaaactccatctcaaaaaaaaaaaaattttactatctggcccaatgcagaaaaaattggccaaaccttgctccaaggcctaagtatacactgtttataagaaacacacttggggctgggcatggtggctcatgcctgtaatcccagcactttgggaggcagaggcaggtggatcacttgaggtcaggagtttgagaccagccttgccaacatggtgaaaccctgcctctactaaaaatataaaaattagctgggtgtggtggcatgaacctgtagtcccagctgcttgggaggctgaggcaggagaaccacctgaacccaggaggtggaggttgcagtgagctgagatcacaccattgcactccccaatactcaccacacacttggtcaggtgtggtggctcatagctgtaatcccagcactttgggaggccaagatgggagaatcacttgagcccaggagttggaaacctgcctgggcaacaaagtgagaccctatctctatttaaaagaaaagaaaaggaatgctctttaaatataataatctagatgggccgagactaaaagaatggggaaaagatatgctatgcaaacattaagcctcagaaagccagagtgcctatattagtatcaaaaaatgttaacttcagaacacagaatgttaccaggaataaggagagacattatataatgacatgggtcaattcacctagaggacataagagtcctaaacatttgtgcgcctaattacaaagcttcaacatgcatgaggcaaaaatggatagaattgaagagaaacggataaatttcctgcaattacagggtgagatttcaaaactcctctcaataattgatggaacaagtagaaaatcagtaaggatagagaagacttgaataacatgatcaacctactggccccaatggacccttatagaacactgcaccaccaacagcagaaacacattcagtgcaactccacatagaacagttaccaggacagaccatatgctgagctctaaagcaagtctcaataaatttaaaaggattaaagtcctctagagaatgttctctgaccacgatggagctaaattagaaatcaatcatagaaagatctctggaaaatccccaaatcctgtcttctccatcaatgccttgctgcgtgaccttggaagtgtgctgcagtttcctcacctgtgaagttagtacaattgtaggcccttcctcactgggttttgtgaagagtgactgagttcatccggcacacagcaagtgctatgcaagtgttttctctcattgtcttggtgacacaggaccgacccgggagaataggctcccaccagcctggctgcaggaccccagagcaaccacttgtcttaccgtggccccctctgtcctccctcctggcaagtaagaatggccagggtccctgtagaccatatagatctgaggggcctgaaggcagaggagatgctgaaaagggcctcccagacctcccaccctcacattcccagcacgtaataatgaaaacagcaatgtcctccacagaacacatgtgcaaagctatgctaggcactgggatggggatggagtgagggcttgatagagagacatgaattaaacagcctcctgaaaaataaaaccaaaaccccaagacacaaagacccagggactgactcaacctctccagaaaccaagtctctccaaacccatcttacaggtcaatgctgccattcatgcaaaacaaaattatttggccaggcacagtggctcacgcctgtatcccagcactttggaaggccgaggtgggtggatcatctgaggtcaggagttcaagaccagcctggccaacatgatgaaaccccgtctctactaaaaatacaaaaaattagccagacgtggtggctggcacctgtaatcccagctactcgggaggctgagccaggagaatcgcttgaacccggaaggtggaggttgcagtgagccgagatcgtgccactgcactctagcctgggcaacaagagcaaaactccatctcaaaaataaaaaaataaaaacaaaacaacaacaacaaaaattactcagtgcctggtacacaccatgcaccctctggcccctgaggacacagtgtggatgactggtggtggtgatggggccactcactaaggcagcagagggaacacagactgggagtcagatttgggagtaaagacatgagctctgttttgcacaaggtgagtttggagatgcctgttgagctcccaagaggagcaatcccagggggctggacacatggaggggtctagagatgacttcggaagtgttagtatgcgcatagcatgggaagtccagcagcaggtgagatggcccctgacaaggtgtatggaacagtggtctctggcagggagggcaccctgggaggtgtttggtaaagtgtgggccactggtgctcagcgtaggacagccggataattcgaggcctggtctgaacaatggggaatacctgttctgtgattatctgagcctaactccttggtacattaaaaacccaagttttttttttttgcatgattataatataaaccaaaatctccagaaatgcacctcttgttttaatcgagggatgactggatgttgttttgtttggaactttgctgagagctgctcaccgttgggggaaatcatctgtctctgacagcaactccactcgaactcaagacccaagtcaagacccttgcaccagctgcattagcaaatcatcacgttcacagtgacttgtatttgcacaaacatactcatttgtcaactatttcgatgtgtcagatatcaagtggcaacataattctgttaaatgatcttacttctcatcatgccacttactcattctaagcaggcgccgactgtcgcattctgtcttctggcatagccacacccaggcatttgtgtattgccataatattattttattggaagtcacttccctgctttttccccttcatattgcaattatggcgttaaattgattttttacaaattatgtgtgtaggaagatatattacccttgaatttcagctcagtgtggaaaaggacgtattaaaaaatatttgttataaaaagagggtgttgggtctgcaagcactgaaaactcactagtgtgagtgagaagccccatttgaggggtggcaaaggcaaaaggaacccacagcaaatgaaacaggaccagagaggttggaggaaaccaggaggacacagagcctagaagcaagaagagagtttctagaagggtggctaaccgggcgaatgctgcctggaggtaagacagaggctggaggcatggataaggggtcgcatgtgcgcctggtgcagctggggttgggggaaggcaggcaaagccaagctactggctagatctgaggttttgtggttttctggccaggagggcgtgaggaaaggaggacctagggaaaagttgaggacaatggctgcagagacagcctaggagccacctggagatggacgagtgaaagcaggaagggctcagagaatggaaacagggaggtcagaggactcatcgcaccaagtgaccaagggagagttgggagggatgggggccatggtcagagtgaaaccttagaaatactgactcccggctgggcgtggtggctcacgcctgtaatccctgcactttgggaggccaaggcgggtggatcacgaagtcaggagatcgagaccaccctggctaacatggtgaaaccccatctctactaaaaaaaaaaaaaaaaaaaaaaaaatcagccaggcatggtgttgggcgcctgtagtcccagctactcgggaagctgaggcaggagaatggtgtggacccgggaggtggagcttgcagtgagccgggatcgcaccaccacactccacgctgggcgacagagcgagactctgtctcaaaaaaaaaaagaaaagaaaagaaaagaaataaagaaatgttgcttctcagccaggtgccgtggctcacacctgtaatcccagcactttgggaggccgacccaggtgagtggatcacttaaggtcaggagttagagatcatcctggccaacacggcaacaccccatctttactaaaaatacaaaaattagtgaagcaaggtggtgcacgcctgtaatcccagctacttgggaggctgtggcaggagaatcacttgatcccgggaggtggagattgcagtgagctgagatcgtgccacagcactccagcctgagcaacaaagcaagactctgtctcaaaaaaaagcgggggggggggggggggggaggaaaagaaacgttaactcctgaggcagagctgtcctgaatagtgacaagccctcaggtgtggctgcaggaggctgtgggctgagggggccctggagaggaggggcccaggtagtgggctgtggccaggctgctgcagatcagctaccaggcaagtcctcgagggtgatggcaccaaatctcaccccctacactggaccctgagtcccacgagggcggggactggcctgctgaatcatggtgctaagtcacatctgaagattctcaaacatctgctgaatgagtgaatgtgtgggaggactttgggtgcagaagagagtgggccccagggccaaaggctccgatgagggagggaacatgagtgggggctgtctgggtgacagcgatgggaaggggcagaaaacagctggctagagagtgtgactctcaggaagagggcccctggctgggcggcagaaacagtggccagcagagatgagggcactggtctcccccaaccctcctgtgaggacgccactagatttgtcatggcaggtctcctaggcgccctcccagcacctcacacacctggccctctccctctgtctaaaatgctcctccctctccttggcatggacgactctgtttctgcctttaggactcaacccagttcacctcctcaggggacccttctctgactgcccccatgctctactgttctcttactgtatcctgtttggttcctcaatagcacattttatgtgcatctgcaacatcattatatggaaaatattagtacatttcacttggactgtgtggccggcagaataggccccgcccaccagcaccaaagaagtctctatcctaatccccagaacacatgaagatgtgaccttactcagcaaaagagactttgcagctgtgattaagttaaggatctggatatggggggattactctggattatccaggaaggcccaaaggaatcacaagggtccttaggagtggaagaaggaagttagagagagagatttgtggatcctatgctgctggttctgaagatggaggaaggggccacaaaccaaggaatgcaagtggcttctaaatgctggaaaaggtaaggaaacagattctccccctggagcctccagaaggaactagccctgccaggaacttgattttacgccattgagatctatttcagacttctgacctccagaactataggataatgtgtattgttttaagctaccaaatttgtggtaactttttgcagtagcaataggaaacaaacagagctttcattgggtttttttgggggttttttttttttttttcatttgagacagtctcactctgtcatccaggctggagtgccgtggcacgatcacagctcactgtagcctcaacatcccaggctcaaacaatcctctacagggttataatttgaaatgatacccatccaaaaccatttaaaaaagccatcaagactcgcaagtgtccaagccagtggaccaagtgaattgctaatgcctgccataccacagttagttctacttagttaggagaagggaaaaacctgccacctattaaggttagtcttgacttgaaaaaggcacaaattaaataatatctttgggacctattctttgaataaaataggatgtccagtgttgatttatctgtttacttgtttattctcagctcctctgcctctccaggacaggaatggggctgattcctcacctgagtgcctggcacatggacaggctcaacaggcatctgtgaaattgttagaggcgtgtgaaccagagcaactccatcttgaataggagctgggtaaaatgaggctgaaacctactgggctgcattcccagacgtttaaggcattctaagtcacaggatgagataggaggttggcacaagatacaggtcataaagaccttgctgataaaaggggttgcagtaaagaagccagctaaaacccaccaaaactaagacggccacaagagtgacctccagtcatcctcactgctacactcccaccagcgccatgacagtttacaaatgccatggcaacgtcaggaagttaacctatatggtctaaaagggggaggcatgaataatccaccccttgtttagcatgtcatcaagaaataaccataaaaatgggcaaccagcagccctcagggctgctctgtctttggagtagtcattcttttatttatttatttattgagacagagtcttgctctgttgcccaggctggagtgcagtggggagttctcagctcactacaacctccgcctcctgagttcaagcaattggagtagccattcttttattccttagcagcctcactgaatcctcacaaccctgagacatgggcatctttctccccatctttcagggaggtcactgaggcaaagggagggttgcggtctggccaagctcacatagccagtaagcggcagagctggagctcagctctccccaccccattcctcgtcacacagctctgcaagggaaaacggggaatcaaatcttccaggagatgccacagccccaaccccatccaggcctcagatgggtccctccctcgccccgggcagaggcagatagaaagcttctcaccagactccgctgacacagcgcgtggacagcgcccggggcatgatctccgagccctgctgcatgaagccccccacgggaaaccacaggctgttgcccagcgtgtactggttctccaggatgtgggggcgtgcccgcaggcatgggtgtgggttataccactcataggggctcagcctgtggagagacgtgcagcgtgtggatggggcccagagcccaggtggggaggaaaaggaaagaagcaaaggaaagtcacagtgatcagaagaaagggggagagatggaaaaaggagcaagatggacagaagcacacagagaaaaggcagagagagatgcacagagatggagacagaagaggcagagagagacacagagatactcagagagaaatagagaagggaggaggcaaaaaagggagaggcgggaaggggagagacctgaacagagaaccacagagcacagtcagagccacaaggggaagaatgagactcagacacagggcacaaaactgagaaaggagggcacagggaatccgaggccccaaaggggaggccaaggacagttccgagagagaagaggcaggtcggtcccagaggcctcggctcgtgcctcctccagccccttccttcccagtaggcagtggactcacctggcagccagaaacaggacgcagctgacagccaggtaggcaagaagcatgaagagccacacagcaggggagaaggggtccaggaaggagaagtagccaggcttgcggccctgtggggagagggagtgagacccggagacacccctggcctgagcctcacacccagcccctgccctaccagggacctgggagcctgaccggcccatctgaggtcctggggctgtctggctcccactcgcaggccctgagcctccatgccaggcaagcagcccatggtctccaggggaaccataccatgtgcactcggtagaggatgctgatccccagggtcataaagggcttggaaaagtcgatgaccttctcccgctcagctgtgatggtgaaggcggccacagccaggtctgccttctgctggaggggaagccgggcaggggtggagggggacagaggggaagacagaagtggacagttagagagaaatgcacggagagtgagcaactgagggaggcgagagagagagaggtagggagggggaggggccaggagcatggactgactccaggagcccaccttgggcctgaaatcggaccctcatcgcatgtccatcctcatcatctcacgtctccagacacactgactccgtcccctaggcctcaactgtgtcccagcatcaagggctggggatggaggggttccccaaactccaattcaagcagcaacttctccctagggccataaaagagccaaggtcctgaaggggctgagactgacagcactcgagataatacaggcccggacagaacacagagcagggagagaggaggcagggcccagaaatgaccccgggtggggaggaagggtgcaggtcagcatgtgcccacagccagtggagacataacccaggccccggcccagtgtatagtcagggagatagggcacaagccccaaacagcatcctggtcaggagacgacactggtaccaaagcacaaccctggatgaaggagggatggcccaggcccaaaacttcagctggaatcagaaatagatggcacaggacccagatacaaacccaaggttggtgagagatggcacaggcacaaatgataaccaccaggtagagagaggtggcacaggctgaaaacaaaatccacggtcaaagagagagcagacaggcccactgtgaaatccagggtcggggagaaaggacacagaccccaaagatgaccccaagcagagagggagatggcgcaggctaaacagctaaagccgggtacgggagagatggcaccagcctcgataaaaccgaggagcagagtgagacagcacagccctgaagcatcatccagaggcggcagtgtggcaggggcccagaatgtggattcggagaatctctctgggaattcctgggtgttgagcatagggagcttccatcccctttgttgtacacttgccacttttatgactaatacgtgaattgtcgtggaaatcatcacagctaatataggactccaattattttaagcacccactgggggtctgtcctagcaaggccctgcatggtggccacatcctcatttcagagaggaggaagcaatggcctttcaggtgggctccagtcctggggccaggagctcaagaccccacttcctcctgaaagcctaagggcccccatcctttgttcccacactggccttctcctcactcattcctggggccatgcctcgggccagacacctgcctcttgctgggctgggcaaggacaggggctctgctcccgaaacactcctcagatctgtccatttctctacaactccaccacccgggcctgggccactggtatctcactcctgactacagcactggccgcctcatcggcgccccctgccgccactcataacctcccagtccattcctcacatataagccaagaggacagtctcctgtttaaaacctgccatggcttcccccagcacttaagacaaaaccttctcatggccaagaggccctggcgacctagggctcagctgccctgccagcctcccctcatatcttctgtcttgccagctgtgctccagccatgatggcccgttctttcctcaatgcagcaggctcatgcccgcctcagagcctttgcacatgctctcccccaagctcttcttccccgttccaggctcccatcacacccaccccttcagccctccccaaagcagcctccagaccccacctcactcccactctagggtctctctcacattccccattggcccttttttttttttttttgagatggagtctcactctgtcacccaggctggagtgcactggtgcaatctcaggtcactgcaacttctgcctcctgggttcaagcaattctcctgcctcagcctcccgagtagctgggattacaggggcatgccaccatgcccggctgatttttgtattttttgtagagacggggtttcaccatattggttaggctggtcttgaactcctgacctcaggtgacctgcccacctcagcctcccaaagtgttgggattacaggcgtgagccaccgcgcctggcctcattgtcctgttcttagcacgactggagatggccttactcaggtgcttggtaataggctgtcttcactccatacaggttccttgcctgtctggctcagtgaggcagcccagagcccgcagagagcaggttcccaacagatcctgctcgggtttgaccgagtacagcctctctgactggcattccaggcagccgacggctcccccaccgcattcctgggccactcgccacccctctctctcgtgccagcttctttctggctacgcctgaggcgcctgtccactctgtagagctggatcccatccatccctccagggctcctcacaccttcactcctctgggaagccattcatggacccccactccctggacaccacttgatctcaacaacttgctcaatttggaaaatatctgtctcttctctgcctctgctgctaaaccacaggcgtttcagaagcaaggccagctggacatgtcatgtgtttctggcactgctcaggggccagcttagagcaggatctgctgtgtctcatgtcccatcctcctccgctgaaacccaggaatgttgctgcttcctctggggccctcccagatgcagagacctcttcttccctggtgccacaatgaaacctcacgcagtcagacgcttgcatgcacacagcacttaccccatgcagccactgtcccagggttttccccagagtagactggtccccagagcaacccaatgcagagggacctccatttctaccattctacgcatgaggaaactgaggcacagagactaagcctcttgccacagttgacccttggattcggaaccactcccctcctaggggctttatctgcctgctgccctggtcgctccatggctgggggtgtctgaggtctggcccaggtgagtgactcctccctggatcccagggagttcaagaaatgagggctgactgatgggaggagtcagtgagtccttgaacctctggccaatatggcggcggcagcagcctccacctctccctgacactgctccacatccagtcttccagccagcaccatcccagacagaaacatgggggttgtcctgtacacagcctctccctcacccctcactgcatccatcctcaagcctcctgattttgacccctaaacacctccggaacggagtcactgccctctgcctccactgcccacacccgcccaggccaccatctctgactgaatagctggtctctgcctcccaggacacacagcctgcagccccagagataccaacatatgacagtctggtcacagtattttcctgcttagattctgcaacgggctgggcacagtggcttatgcctgttaacccagcactttgagaggccgtcaggaggattgcttgagccaaaagttcaagatcagccagggtaatgtagcaagaccccatctctactaaaactaaaaataaataaataaattctgcaatgactctgcttgtttgtatttttctttttagagacagtgtcttgctttgttaactaggctggaacacagtggtgcaatcataagtcactgcagccttgaactcctcaagtgatcctcccacctcagcctcctgagtagctgggaccacaggtgcgagccactacgcctgactaattttgtttatttcttagaaagaccagggtctggctatgttccccaggctggtctcgaactgctgggctcaagtgatcctcctgcctcagcctcccaaagtgcttggattacaggcatgagacacagcgccttgttctttttattattattattattttttagaccaagtcttgctctgtagctcaacctctgcctcctgggtttcagcaattctcctgcctcagtctcccgagtagctgggactacaggcagatgccaccacacctgtctaatatttttttagtagagatggggtttcaccacgttggccaggttaatctcgaactcctgacctcaggtaatccgcctgcctcagcctcccaaagtgctgggattacaggcatgagccaccgcacccggccctatttattattattattattatcattatttttggagacggagtctcacttgtcacccaggctggagtgcagtggtgcaatcatggctcagtgcaacctccacctcccgggctcaagcaattatcctgcctcagcctcccgagtagctgggattacaggtgaatgccaccatgcccagctaatttttgtattttagtagagaaggggtttcgccatgttgcccaggctggtcttgaactcctgacctcaggtgatccacctgcctcagcctcccaaagtgctgggattacagacatgagccactgcacccagccaccttgttcttaaactgtcatccaaatgcctcacccgacccaatgaggccctaactacacctatcacctcaataagactatgtgccatgcctgttccccttatgagactctgtcttacacctggccccaaaacgtcccgcaccatccaacccccacagcctcatcccctaccatcttgccctgtgtcccacattgcagccacactgccctttccatttgttcattctttcatttatttacctgcctgacaaatatttgtatagcgccctccactagcccagcacaattctagctttggggatacggcggtgaatagaaacatacaacgtcaggtagtgacaagtgctgtgatgaaaaatcaagcaggcagcaagagagagactcgagggagatgctgttttggatctgctccccactgttgcaaggggggtcttatttgaatagcaacatgaaggaagtacagaaaaggcaggagaagacctagggggaaggttccaggctgagtgatcagcgggttcagtccctaaggtgggaagagacttgcagcatccagcaaggctggagcagaataggagggcctgggaaggcagcagagtggggccaagagcctggcagggccttgcgggccacagtaaggtaactggattctgcaccttgggcaatggaggacattgcatgaggatgtcatataggaaggtgtgaacagagggtgacattatcagaccacaggcacaagagtggatgtgggaaccagggagccaactgcagatgcccatcacagtgctgggggcaggactgagtggcagcactggtggtggagagagacagtgagatttgggtctcatctgaaggtgtgatggaaggatcctaaatgctgcaagttcttcctaggctcctcccagagcctttggagcccccttccctcctcctactcacttttcatttctaaaagaaaggcttatttatttgtttttgtttttgagacagggttttgctctgtcacccaggctggagtttagtggtgtgaaaatggctcactgcagcctcaaactcttgggctcaagcgattctcctatacctcaacctcctgagtagctgggactataggtgtgtgccacctcgcctggctaattttttcattttttgtagagacgggggtcttactatgttgcccaggctggtcttgaactccttggctcaagcaatcctcccaccttggcttcccaaagtgctaggattacaggcgtaagccaccatgcatggtaaaagacctattccttagagatgacttccccaccctgacatataccctctagcccctaccctgacgggccccctcacagttatttaatctctgaaatgaaatcaggaagaatttgaatgacaagtcacctgtaatgatggggggggggtgtcatctaaatgcccaaagccaatcaaagcacttgtgatagtccctcagctcccaacccatcctgtataccctgttctgtgtaaaccatattcctgctttgcctgctgcgccctgccaggctctgccaatagggggcgctagcgggaggttgccagactgaggagggaagagggattgctccttcctgtctcctctcccaccccagccaccttctgcccctcctggcagcatcgtttcttctcctggcagcagatgaatccggtgtgcagcttcccaatatctacaaacccatctcatccagcctctctccagaacccagcaccagctgtaagcacctctccccagggtctgactttcagctccacagagcccttcctctaagtttccaagagtttcagctcttccctttcttccttcagaactagggatgtggccacttcctgccatgatacctccatgacacctgagagtgaggggtgggaaagctatggcccttgggccaagtccagcccatctgcctgcctttgtacataaagttttattggaacacagtgatgcccactatattgtccatgactactttccatacaacagaagagctaaggagttatgacagtaaggccttaaagctgaaaatacttacactcttggccagaaaaagctggctaggtcagtgcagtggcccatgtctataatctcagcactttgagaagccaaagaaggaggattgcttgagcccaggaattcaagactagcctgggcaacacagtgagaccccatctctacaaaaaaaaattttttttttgagacagagtcttgctctgtagctgggctagagtgcagtggcgcaatctcagctcactgcaacctccgcctcctgggttcaagcaattctcctgcctcacccttccaagtagctggaactacaggcgtgtgccaccatgcccagctaatttttgtatttttagtagagacggcgtttcaccatgttggccaggatggtctcgatctcttgacctcgtgatccgccctcctcagcctcccacagtgctgggattacaggcgtgagccaccgagcctggctgctacaaaaacttttaagaattaactgagcataggtgtttgagaccagcctagccaacatggtgaaaccccgtctctactaaaaatacaaaaattagccaggcttggtggcaggcgcctgtgtaatcccagctacttgggaggctgaggttgcagtgagccgagatcgcgccactgcactccagcctgggggacaagagtgagacttcgtctcaaaacaaacaaaaaaaccctagaggtctgcaccatgagctagccactggtgcttgctcaaggctccatacagcattcctatttgccatcaatactttgcgaatgaatctcccgatctgctggttacatctggcccaggtggcagatcagctcgcatgcagcctggactggctgcagagtctttgatgctctggacctcactccagatgaaaaaagccttacgggctgtagggaaagtaaatggattgaagtagcacatcccaatgtggtatgagttgccaccaaaatccaaaaagtccaccaaatgtcacatcatcaaccaaacagcaccccctcctcagcagtctgtctcagctctgtggggccctcctctaagcttctaagttttcatctttcaaactcttctacttgtcccttaaggactaagtgtggtagctgctttctgccgttgctactgccatgacctcttagttttctttttaccccttaagttagctggttaacaactttacatttagttaacaattctttatactaaatactctctattcaaataactgatatgattctattcaagtaaatggagctgggttttgttttgtttttatttttgtttttgtttttgtgacagagtctcgctgtcgcccaggctggagtgcagtggcacgatcttggctcactgcaacctctgcctcctgggttcaagcgattcttgtgcctcagcttcctgagtagctgggattaaaggtgcgtgccgctgagtctggctaatttttgtatttttagtagagatggggtttcactgtgttggccaggtgatccacccacctcagcctcccaaagtgctggtattagaggcgcgagccaccgtgcccagccagggttttgtttttgtttttcagacagggtcttgccctgtcacccaggctggagtccagcagcgtgatcatagctcactgtagtctcgaactcccaggctcaagtgatcctcccacctcagccttccgagtaactgtgactataggcatgtgccatgcccagctaattttttttttttttaatgtttagtagagacaaggtcctgctatgttgctgaggctggtcttgaactcctgagctcaagcaatcctcctgccttagccttccaaagtgctgggattacaggcattagccactgcatctggcaaccggcgctgttttgtatccagactggaccctgccagactggaccctgccagactgccatctgccaggtttaatgccaactgcactgactcaactacttcctgctcatcagatctgatcagcatactgttgtcaatgtaggggaccagtgtgaggctatgtggactgtagagttcaagttctttgcagcctaaatcaggacagaaagtgggaaagttgatgtcacactgagcaagactgtgaagatgtgaaccttgccttctggtagcccttggaaattggtatggagaaaaaagcatctgccaggttagtagctcacaccagctgccaagggctgtgctgacttgctccaatagagaaacttcatttgggacagcaactgcaattggagtcacccctgatcacgttgacaataatccaaagtcattcttccaaaatccatctgccttctgtacaggccaaacaggccagctgaatgtagatgggatcactacccctgcttcttccaagccgttaatggtgacactaatttccacaatttgcacaaaggatagagaattgcttttgaattactattctgggaaagacagggagttctaggagcttccacgtggctctttctaccataatggccctgactccatgggtcagtgcgccaacgtgggattctgccagctaccatgtgtgtctattccagttatacaaccaagaactgggaaaacacagggtgggaccatggccccatcaggccccttctgagttaacctgggctcagattccaccaatcacttgaccacataagtcccactgtgtggtctaccagtcaaagcaggaaaaatcaaaatgatatgccatccatgaaaatgacagggagttgtctaagtagctaaaagccgataaaaacactcaatgctgagaaggagcctatatagaaactgttgtagtctttctggaaaataattcaacaaaatatcacgaaagccacaaaaagggtattcttcttccacccagttattctgttcagagaaccaatcctaagaaaataggctgcaatgcaggcaaagcttttgtgcataaagatgcttgttggccaggtgcaacaacccatgcctgtaatcgtaacactttgggaggccaaaatgggtgaaccacttgagcccagggactcaagaccagcctgggcaacaaaatacaaaacaattagccaggcatggtggtgcacacctgtagtcccagctactcaggaggctgaggtggaaggagcacctgagcctggggaggttgaggctgcagtgagctgtgatggcaccacagcactccaacctaggcaactaagtgagacgccaatctcaaaaataaaaaaaagatgtttgttaatgattatttataagagcacaaacaataaaaacacctggaaacaactagttatgaaaaatggctaaataaattatggtacatccacatggaattactactatgcagccaagtaacattctgtttaggttaaaacaatgatattatatttggcctttgagatgggcaaagattttattttagagattggtaacactgactgttggcaagagtatgggaaatttcacattctcatgcactttggtaggaatataaattggcgaagcctttttgaacagccatttggcagtatacacttagaaaaaatttataccctttgacccagcactttcacttcttggaatgtatccctcaggaacactcccacaaatccacaggccaagtttatcatgacactggctatgctagcaaagctggaagccatccaaatagccatcaataggggatatggtaaataattcatgctgagccacacaatggaatccttatatcctcacttgaattttaagcaggcatctcaaatgatccgtgaccagagaaaactcttgtttcccggccccagcaaactgctcctcccatgtcctccttatagtggaaactggcctcgccattcgccagctgccctggccaaaccccatagtcaccccgattcctctcttcctcttatgcacatccaagctggctgcacacctgacacagctgccactcaaaccaaggcaacatcttctctcatccacaccctccaacagcctcctaaatggaccattcagtttctactcttgtcccactaaggtgttcctcaagacagcagccagtgcaatcatttttaaatgatttaaaaattagatcctgctggcctatgcatacaatggaatattattcagccataaaaaggaatgcaggccaggcgcagtggctcacgcctgtaatcccagcactctgggaggctgaagcgggtggatcacgtggtcaggagatcaagaccatcctggccaacatggtgaaagcctgtctctactaaaaatacaaaaattagccgggtgtggtggcgtgtgcccgtagtcccagttactcaggaggctgaggcaggagaactgcttgaactcatgaggtggaggctgcagtgaaccgagatcatgccactgcactccagcctgggcgagaaagcaagactccgtctcaaaaaaaaaaaaaaaaaaaaaacggaatgcagtactggtatatgccatgatgtggatgaactttgaaaagttggaaacatcatgcaaagtgaaagaagccatacacaaagaccgcatattggatgattccatttatgtgaaatatttgcaataggtaaacccatggagacagaaagatgggtggttgccaggggttggggtagcggggagggagtggggagcgactgcttaatgggtatgagttttatgggaggttatgaaaacgttttggagctagatagcaatagtgattacacaacactgtgaatgtactaaatgccactgaattgcactccttaaagtggttatttttatgtgacataaatttcacctcagtaaaaaagagaaaaaaaattgatcaggctgggcacggtggctaatgcttgtaatcccagcacttttggggggccaagggagatggatcatttgaggcaaggagttcaagaccagcatggaaacaaggcaaaacgccgtctctattaaaaatataaaaattagccaggcatggtggtgtgcgcctgtaattccagctatttgggtggctgaggcacaggaattgtttgaacccaggaggtggaggtcgcagtgagccgtggtcgtgccactgcactccagcctgggctacacagtgagactctgtctcaaaataaaataaaatatcatggcacattccttgcttaaaaccttccagtggctctgcagcacgataaaaataacagccaaggccaggcatggtggcttacacctgtaatctcagcacttcaggaggtcgaggcaggtagattgcttgagccgaggagttcaagaccagcctggccaacatggcaaaactctgcctctacaaaaatacaaaaaccagccaggcgtgatggagcgtgcctgtaatcccagctactgggaaagctgaggtgggaggattgcttgagcctgggaggttgaggttgcagtgagccaagatggcaccactgcattgcaccactgcactccagcctcggtgacagagcaagaccctgtttcaaaaactaaaaaataataataaaaaataacagccacactccttagcagtgactgtgaggccctgggatgtgggccctgctctcggatctctctgcccctcactttttcccctcaaccacacttttcccctcaagtctttatacatatgggctctctacttggaaaacactcttccccagatccatcctttcacttggcaattatttgctgcgcaccagctgggtgtcagatggttctaggcgctggggatgcagaagtaaggaaaatagtcaaacttctgccctcataaaaccctccctggtggctcttctcaggactgtattccccaccccttttaggtctcttctcaaacgttatccaaccaccttgtctaaaacagcatccacgcaccagacacttttatctccttaccttgcttcacctaacacgatattaatatatcatacgctgtcagtttcccccactagaacatcagcagttggggcggggggcgggaaggaggggacaaggagcacctctgctcattacattgctgccccctagtggccaggatgcagtgggtgcagaatagttgctcagtagttattcagtaagtgaatgactaaatgtagctggtttgtttttgttttcgtttcgctcttgttgcccaggctggagtgcaatggcaccatctcggctcaccacaacctctgcctcccaggttcaagcaattctcctgcctcagccccctgagtagctgggattacaggcatgcgccaccacatccagctaatttttttgtattttcagtagagatggggtttctccatgttggtcaggctggtctcgaattcccaacctcaggtgatccgcccacctcggcctcccaaagtgctgggattataggcgtgagtcactgcgcctggcctaaacgtagctgtttttaaagatgaggcagatctatgtgtactaacgtgggaagatggccaagttacaagtaaaaaaagcaaactacacagcagtaagtatagtaagatatcatttttgcaaaaataaaaatttaagaaatttaggctgggcatggtggcttacgcctttaatcccagcaccttgggaggccgaggtgagcagatcacctgaggtcaggagtcgagaccagcctggcctacatggtgaaatccccatctctactaaacaatacaaaaaaattagcctggcatggtggtgggcgcctgtaatcccagctacttgggaggctgaggcagaagaattgcttgaacctgggaggtggaggttgcagtgagccaagatcgtgccactgcacgccagcctggggaacagagccagactctgtctcaaaaaaattaagaaatttaaagatgtacctgtattaatgaatttgtagaaaatgagttggaggaatatggtctctgaggtgtaagaacatcatgtatatccagtgtttctgctatttgtaccatttggtattttatcatttagtattacatatataaacagaaaataaaggagttccttctcaaataattgcttatgaaaatttctgatggtatgcaaaaatgctttttaatgcatatatacttgctattgttgtgcaaaataggattatacttaatacaaatatgttttataaccggaaacacagtataatgtaaaattttttaatgaaatggactttatttatttatttatttatttttatttttgagacagagtctcactcttgtcgcccaggctggaatgcagtggcgcaatctcggctcactgtaaccttcgcctcccaggttcaagcgattctcctgcctcagcctcctgagtagctgggattacaggtgcacaccactacgcctggctaatttttttgtacttttagtagagatggggtttcaccatgttggcggggctggtctcgaactcctgacctcaggtgatctgctcgccttggcctcccaaagtgctgggattacagatgtgagccactgtgcccagcctatttttttaaaacagggtctcactctgtcgcccaggctggagtgcagtggtgcaatcatggctcactgcagcctcaacctcccagactcaggtgatcctcccacctcccagcctcctgagtggctgggactacaggcacatgccaccacacttggctaaattttttcaatttttgtagagatagggtttcaccatgttgccaaggttggtcttgaactcctgggctcaagtgatcctcccacttcggcctcccaaagtactgggattacaggcgtaagccaccatgcctggcgtgtgtgtgcgtcttctatcagatgaagagaactggggacaacatttctaaagactccttgatagaatcagtcaattgcccattcaacactaatttactagaaacctgccatgtgtcaggccctgagctggggacatagctaagtagacaaggctcccatccccagggtgtggaggccacaggtgaggtgggtgggtattgtcttggtcatgccagcatctatgacctgtgctgatctcatctgtcccctgtgatacccctccaagttagggggtcaccactccccatttgaggagacactaaggctcagagggggcagccacctgcctgcaggtcacaaagccagtaaggagtaagtccagatttgaacccagggttagccgactccaaaacccattcttctaactacactcacatacagaccgcctcaagaaaggtatctagcagtagtgaccacatgtgagccaggcatgtgccaggctctgtgcaaatgcgctctcatttaattgccttaaaactcactggctgggtgcagtggctcatgcctgtaatcctagcactttgggaggccaaggcggacagctcacttgaggtcaggagttcgagaccagcctggccaacatggcgaaaccccgtctccactaaaaatacaaaaatagccgggcattgtggtgcattcctataatcccagctacttaggaggctgaggcaggaaaatcgcttgaaccctggaggcagaggttgcagtgagccgagatcacgccactgcactccagcctgggcgacagagtgagactctgcctcaaaaagaaaaacaaaaacaaacaaacaaaaaaaccctctgtgagggaggtaacattagccccttttcaagaggagtgactgaccttcagagataagtggctttgcagggatcatgtgggagcactggggacctgaagctggctccttctggctcctaaccagtgcactgctatagtggactccatggtggctacccagactctgtttcaggagtggggcactcattgcctcagctgcccagggtgtaggtggctgatggctctcagctctgtcagtagaagagcgtcccctcacccaaagtcctgactctccccaagagcagcccacgtccagtgacatatcagtgggtgcttaaaggcctggcacccttaccacagggggaggtccttgacggccagctcagctccagagctgcctgtgggacagctaaggcccagttgtgactgcagcgcagctcaactcctctgcccaagcctgcttccttccctcctgcacagggcaggtttccaggggcacgccatcacacctcctgcctctacatctccatctcagagtcagcttcctgggaccctgacctaagatcttctttgcccttgaaggctaagctttatcctgagggcctcaggggcttcagttaaagcatacaagtgacagatcagactcacactgtagaaaggttctattggaggacaagctggggagtggagagactagaagccaggaggccagtaaggaggctgatgagaggggtgggacctgaattcacaccatggcagtgatggcagggagaaggccaatgtcagccatggccactgggtggaaaaaatgggtcataattcaagacaggccaaggagacctgtgcctggcccaggggtgactggcaggatggtggtgccccaggctgtcttccatctggaagtcactcaccagctctgggccaccctgatggggtgcccaccttggctctcctggtcactagccatgggcctggacatgaaaccttgatgcctcactgtacatttgagaaaacggggctaataccagtccctctctcactgggtggccatgaggagtcaaggatggagacaagtcagaaagctcagacaagggcctggcacagcgtgccactccatcagtgtactccgagcttcccaagttcccagctggagggctggaaagggcacgggccttaagtcagacacacctggctgcagccctgtgcactggggactccagatctcacactgggcagtgatcctcaggccatgaaggactgctatgaaaattatgttaagtaacacttgaaaagttcctcgcacatggtgtgaaatcaacaaatgacagctgctgctgttgtgatgacggtggtgactattcctgtgcagctcggcacactcggctatcccacagcagggcaaggccaaactccgcctatccttcacgctccagctcctcctccagtgttctccctgtaaatgtcattgccatcacccagatgcccaagccagacacaggaggaatgctctccctcctgtcctctcctgcatcccccaccctaggcagtcaccaagccctggtgctctttagcccttcccctagtctctagctctgacgttctcccgcctgaggcccaccagctcattccttatctcctcactggtcttcctgttaccactgcttcccccaaccccagggccaattcacttgagccagatcaaaacccttcaagggtggccgggcatggtggctcatgcctgtaatcccagcactctgggaggctgaggcaggtggatcacctgagttcaggagtttgagaccagcctggccaacatggcgaaacccatctctactaaaaatacaaaaattagccaggtgtggtggcatgcgcctgtagtcccagctactcaggaggctgaggcaggagaatcatttgaacccacgaggcagaggttgcagtgagccaagatcaccccatggcactccagcctgcctgggcagcagagccagagtccgtctcaaaacaaaaacaaaaacaaaactcttcaagggcatcccatgggctttctgctgaggcccaaaccctttagcccactcagtaagagcacatcgggcttgttcaccatggtatccccagggtatagcacagggcttggtatacagtaggcactcaacaaacattggctgaatggaaaatggatgaacacacaaatctatgtatgtgctggccatgctggtatgaataataacaataataaaaatagtataatcccagcactttggaaggctgaggtgggaggattgcttaagcccaggagttcaagaccagcctaggcaacagggccagaccccatctctacaaaaaacacaaaaattacctaggcattatggcatatgcctatagtcccagcaactcgggaggctgaggtgggaggatcgcttgagcccaggaggtggaggctgcagtgagctgtgattgcactactgcgctccagcctgggcaacagagagagacccagtctcaaaggaaaaaaaaaaaaggacacacgcatacagcacccactatgcaccaggccctgttctaagttcttcactgcatgttgttcttcaaaacaaccctatgtgctaaagggctgttattccccaattttacagttgaacaaactacaacctaaagaaatgttaagcacttgcccaaagccacacaaccagtgcacagcagagctaagctttaaacagccaaccacagacactctcagctgccacactttgctggccccaggccccaaatcctctcaccctaccctactgagtaggccctgagacacaaaggtcagacagctgtaaataagaactgttccagacttctctgttggtgaaaaaagggcatccagtttagagtgacttcaggtgcagggctactcccttggagcctgcttatttctgggataccagatgaaagaatatttctgagcctacgtgactaaagaccaggctgtggaaacaggtcacgaggaagcctgtgccctcaggtgggcatagagctgtcagctctggggcttctcatctcctgtctcacccggggcctctttgggcttcaggctttaaaattcaccctgggctgggtgtggtgtctcatacttgtaatcctagcactttgggaggtgaggtgggcggatcacttgaggccaggagttcaagaccagcctggccaacatgatgaaacctgttgctccaaaaaatacaaaaatcagccaggcacggtggcgcacctgtaatcccagctactcggaaggccgaggcaggagaatcgcttgaacccgggaggtggaggttgcagggaggcagaggttgctgtgagcagagatcgtgccattgcactccagcctgggcaacagaggagactctgtctccaaaataaataaataaataaataaaataataataataataaaattcaccctgaccttaaaactcaccctggggcagaagttttcaaaccagctggcagctttatggggcagcgccttgggacctgcctgtggggtggggtgggaggcacccccatctctgccttcaccagagcagctctgctcttgcccagggttctgagggagtttgcaattggaaaaaaagttctgtcaaaataacttttgaaagtcagtgccctaagggataaacgtccttgtcaagcaaagtggccctctcatgtcttccctcgtgatgttcagggggttggatgctgtaaattctggcatgagagagaggagggtgagaatctctgatgagctctgtcaagtctaacgtcaaggctgccctggccatctctggccacagccccttggtctgcacaccagctctgggagtgtcctaatcaggggcctacttatctcccagggcacagtcctgcctctgggcagttgtgcccatagtttctcccacctggaataaaaagaggaactacatttcagtcccccagtatctgccaagcgatgtgtgaggtacttgtccccacgtcccgtaaccctcactatagacctgcaaggtattattatccccatcttagggaggggaaaactgaggttcagaggagagaaatgacacttaaggattcaaatctaggagtgtctgacacccaaagatcctttccactgcacccttgcctgccacctcccatggccctgccttccatccctcctcagctgcaaccaaattctgcccacgctcaggccccgctggttcctccagtgcatcccactccctagtatcgccccatctttgtagatgctatttcccctgctccaaatacactccccttctcccacacccccttcaccttgctaactccttcatgacctttgggaatcagtttgggtatcgtctcttctgggaagccctactgggatatctgactgggtcaggaacctcctctgggaccgtcctctgagctccccaatcacagcccagacagctctgtgctgtggtcattcactgtcttgcgccccaaagagactctaagctcttgggggcagggtccagatccactgtgctcacagtgggatcccatgcccagcaagaggcaaggcacatagtaggtactcaataaacagccactgaatgggtgaatgtatgagttctacatgcagccctccaggtccatgatgtgccaggccctccctagcaggtgctgggcatagcacacaggtgaggtgtgctccctgctctcagccctgcctcctgcaggaagcctttgacctcctcagaccttttcctgctccccactccatgtctctttcattcacttaacaaatctttgcacaccgactaatccaaggtggcatgaaaggggcatttggcaaagcaggacacaggtggtgatgcatgtaccacctctcctcctctgtcccatcccacagcacccgccaggcacaggcatacagcgcaacatcagtgaggtggtgtcaggggcccttcatggctccttcctcttctgccaccagccaggctgcttctgaggttcgactggctgcccagctgcccgccctccctcactcgccgggtccatgcatctttcccggccccagtccagccatacccggttgatgagctcgccaaccatgcccgtccaggagccgttgggctcgggcgccccgtacagcccatcctccaccaaccgcaggcggtagcggaagcgcagcagctcggccagctcccgcagcatgtccacgcagaagccctcgaagcgttcgttccccgacagggcctggaagttgggccggcgcatgacgtatgggttctcctgggtgggcagaagaaagcaggggtcagaggctgggtgtctagtggctgggttgcggatcctggagcccggaccaggcaggtagagcaggaatctgcttgctgagcacggttgatttattcatagtacacatttctcacttacaaatgctcagagtggggaatagacctgaaagccagggaaaaacacatgggtactgccagttcctagcagattgcagggagccattttaatcttcagcagccaacctgatgctcattggtgccaagctcaaatgcgtatgagggaggaggtaactttagagtcagactggatagatcttgtgccaaagtggatcaggggctttcagatttcttattacaattcacagtaaaagatacattttaccctgcaacctaattcacccacacatgaacacacgtaactagacttaattccacagaacagtccttgccctagtaactatgggcaatacactgatattttctattctgctatacttcatctttccacatggctggtaatgactcaccaaaccaacttcatgagccactaatgggttaaagatggtattccctcaccagggtttagctccagtccaattccccatgagggaggcaggctgaagatgacagatggtgcaattttttttttttttttttttttttgagacagagtcttgctctgtcacccaggctggagtgcagtggcgcgatctcaactcactgcaacctccacctcctgggtttaagcgattctcctgcctcacccccgccaagtagcttggattacaggtgcctgccaccacgcccgcccaattttgtttttgtatttttagtagagacggggtttcaccatgttggccaggctggtcttaaactcctgacctcaagtgatccgcccacctcggcctcccaaagtgcaggtgtgagccatcgcacctggcccagatggtgcaattttaagagaatttggaaacttaagattgttttataaagtctcctggttataaatgttagcaactctcatgcctgaaatctcactgctttggaaggctgaggtgggaggattgcttgagcccgagtttgaggctgcagtgagctatgactgtaccactgcacttcagcctgggcaactgagcaactctgtctctaaaataaaataacataaatgttagcaactgatacggttaggctttgtgtccccacccaaatctcaccttgaattgtaatccccataatccctatgtgtcaagggagagaccaggtggaggtaactgaatcaggggggcggtttcccccatgctcttctagtgatagtgagttctcacgagatctgatggttttataatgggctcttcccccttcactcggcacatctctctcctgctgccttgtgaagaaggtgccttgcttccccttcgccttctgctatgattgtaaatttcccaaggcctccccagccatgctgaacctgtgagtcaattaaacctctttccttcataaattaccgagtctcgggcagttctttacagcagtatgaaaatgaactaatacagcaaccaattcaaattctaataccaattattattaaatgttctgcaggccaaaacaaacacagtttctagtttgcaatctctgacctacagtcagtttgccacattgacgcttatttctgaggggtttgagcaaactttactgatcccgttgtgccaaagaaacacaaaagcagaaagaatggtccaagtgctaggaaaacaaggcatgtgatgatggtaacaaatgggaaacttatctggacacagttattgtctaaatggttgtttgtacaatgtcactttggaataatgaacaaaaggacttaggacttagggaagagccaggaaagagctttggttaaaatatacacaatgagccaggtgtagtacctcaagcctgtaactctaacactttgggaggccaagacaggtggatggcttgagcccaggagctcaagaccagcctaggcaacatggcaaaaccccgtctctataaaaaatacaaaaattagccaggcgtgctggtgtgcacctgtagtctcagctactcgggaggctgaggtagagtcccagaggctcaggttgcggtgagccgagatttcaccactgcaggccagcctgggagatggagcgagactctctcaaaaataaaataaataaaatatccacactggttattgtgtattgagaaactgtgctgtgcattctctcgatgacattattttaattccttatggtgaccttacactgaaatgggcataagtagattccttttacacatgtggacacggaggctcaaagtggttaggtgacctctgtcacctctcattcattcaacacacaattactgagctccatggtagatgtggccacaatattgtgctgcttcttctagcaacagatggggtccatttctccctgggttcagacttcttggtctgagctggccttatgacttgttttggccaactggatgtggcagaagtgatgccgtgtgaattccagagtctcagccttcagagcagcccccatttaaggaagcccaggctggcctgctggagggtgagtgaaccaaggcatgccagccaacagccagcatccacagccattctgcactttccagtccagtctggacaccagctgaatgctgccgcagtgtgcccaagtgagaccagccaaagaaccactaagttgacccacggaatcatgcaaaataatcaactgctattgtttcagtttctgggttctgggtggtttgtcacacagtaatagaatctcctactatgtggccaggtcataggctctggactccaggaccccacagagccctacagctacagggtgatggaatggagggcagtcagtgattctctattaagctgcctttccagaaccaaaattgtggaacggggaacaagaatgtgagataatactaataatagcggcagcagccagcatttcttgtgggcttgctgtgtgacagcaattccgtcagcgtgggatggcagtattattacgtctcttttagagatgaggatgctgaggtccagagaagtgaagtagtaagtggctgagaaggacaagttggtctgattccaaagctccgctcttaagccctgtgctagactgagctcaagtggacagaatcagacagtggatatgggagaagccagagagagacgagggacccaggttgggtatcaaagctggagaatcagaaactgagaatcctagagacaagggcctggctcccatacagcccccttgacatatagaggatagaaccaaggctcagagaggtaaagcatctagcccaaggccacccagctgaagcagggcagtgggaagggagacggggcagagctgggcttcacaacccagtcactgtgcactctgaaccctgttccttccactatgccaagctgatctctaaattcaagactgaggaacttaggttcagggtctcaggactggggtctgagcttagggagacaaaaagagactggggcctgtgaatagaaattagataaccgtaatctaggactcaacttagagtcacagactatcagaacagaagggtcctcaaggagcctcaaatccagggtcttcagacttcaaaaagaatcttatgcagaagcccaacactgcagccagacaatgagatactgctaagtccagttctaagaatttaccctacaaatggctgtgcatcaaaaacgcaggtccaagaaagtcagtgcagcattgcttgtagtgagaacaaagactgaaacaacctaatttgggccaagttaaaaagattatcgatgtcataaaagaatcccaggcaaccactaaaatagcaaggtctacaagatatattaggaggaaaaaaacaagctacagaacaacgtgtacaatatgctactctttgttaaagaaagagcaacgatgtgcttgtatatgcatagacatttctgggaggatggtggcctctgaaaaaagaaaatgagagacccagggaaggaaggaaactgatttttcactcctcacctgccttgtactctttgaattctattttacgtaggtttgtattaacttctgtcccttccccaattttatttatttatttttgagacagagtcttgctctgtcacccaggctggagtgtagtggtgcaatctcggctcactagaacctctgcctcctgggctcaagtgattctcccacctcagcctccggagtagctgggaccacaggtgcgagccactaagcctggctaatttttgtattttttgtagagacagggtttcatcatgttgcccaggctggtctcgaactcctgagctcaagtgatctgcccaccccggcctcccaaactgctgggattacaggcatgagccaccatgctcagcccccttccccagtgtaacaatttttttaaaattgaagtatgatatttaagtgtgtatgaacatgcatggttggctgggcttggtggttcacgcctgtagtctcagcactttaagaggccaaggagggaggatcacttgagcccaggagttcaagaccagcctgggcaacataggaagaccccgtctcaataaaaataacttataaaaaataaaaagaaatgcaaagagtcaagaagaaccaaagtaatcctaaagaagaaaagcaaaactgggggtttaccctgccaaatgttaacacttaatttaaagctatggtatttaagacactgcagtactagaacaaagacagacaaacagacaatagaatggagtgtttggaaacccacatataaatggatattgatttgtgacaaaggtaaaactgtcctgaagggggaagaattattgttataataaatggtgctgctgaattaaatacccatatggaaaaaaatgtattctggccaagtgcggtggatcatgcctgtaatcctagcactttgggaggctgaggcaggtggattacttgaggtcaggagttcaagaccagcctggccaatatggtgaaacccctatctctactaaaaatacaaaaatcagccaggcgtggtggtgggcgcctgtaatcccagctactggggaggctgagacaggagaatcacttgaacccaggaggtggaggttgcagttagccaagatcgcatgctactacattccagcctgggcaacagagtgagactctgtctcaaaaaaaaaaaaaaaaaaaagaaaaaaatgtattttgactcccctacctcacatgctacataaaaatcaatttcaggaggatggcagacccaaatgtaaaaggcaaaattattaagtttttagaacacaaatagtagaatatcttcatgatataggggtatacacggaattcttaaattctaaaatcattaaccataaaggaaaaaagctgatgaagagaactttggtaaaattaaaaatcaaatccttttatccaaaatatactactgagaatgaaaaggtaagccacaaagggggacaggacatttgcaatacatacatcagacaaatgacttgtacccaagaatgtataaataactcacaatcaggctgggcgcagtggctcacgcctgtaatcccggcactttgggaggccgaggtgggcagatcacgaggtcaggagatcgagaccatcctggctaatcggtgaaaccccgtctctactaaaaatacaaaaaattagccgggcgtggtggcaggcgcctgtagtcccagctacttgggaggctgaggcaggagaatggcgtgaaccgaggaggcagagcttgcagtgagccgagattgtgccactgcactccagcctgggtgacagagcaagattctgtctcaaaataaaaaaataaacaaataaaaaataaaaaataactcacaaatcaataaaaagtcacatatcccaatttttttaaaatagaaaaagacatgaataggaaccttgcaaatgaggatttccaaatagccaataaagggccaagtgtggtggctcatgcctgtaatcccagcactttaggaggtcaaggtgggtggatcccttgagcccaggagtccaagaccaggctgggcaacatggtaaaaccctgtcaattaaaaaaaattgtttttaattagctgggtgtggtggtgcacgactgtggtcccagctactcaggaggctgagataggagaagtgctggagcctggaggtcgaagctgcagtgagctacgattgggccactgcactccagcctgggtaacagagcaagaccctctctcaaaaaacaaaaacaaagaaaaatcaaatagccaataaacacaaaaaggtgttctcccttcctgatcattagggaaatgcaaatgaaaaccaccatatatggttggtacctttatacactcaccactgacaaaccgagtagcaagtggaattttcattcattcgctgccgctgggaatgaaagtgaaagtggttcaaccactttggaagacacttttacaatacgtgataaagctaggacaaacaccctgggacccagcaactagaacacacccaacagaaacaccagtacatgttcaccaaaagacatggaagagaaccttcctagtagtactattcctaacagcaaaaagccagaaacaaacgtccatctagattggatgaatcaggaaattgcagtacattcaacatacaacaatgagactacactacttgcaatgacacagatgaaactcataatgttgccagaagaagccagtctcaagaaagaacacacagtacgatgccatttatatgaggttcaagggcgggcaaagctgatctgtggtgacggaagctgagatgggggttagccttggagggttagtgattggaagggcatggggaggctttgggttggggacagctggttggttacacaggtgtgttcagtttttgaaacttcagtgagaagtaacacgatttgtgcacatttctgtatgtgtgttacacttcagtgaaaatcaaaagtaaaaacaaaaaattaaagtagggtaggttctagaacattccttacaagctgattgcttggaccctttcatgaacctgggatccaaatccttgtccaggatttcctgcagtgtcaacactgatctagtccaacctcctcactctgctatgaatattttatttacgtatttatttattattattatttttagacagggtctcactctgtcgccctggcagtggtatgatctgggctcactgcagcctcaacctcctgagttcaagtaatcctcctgcctcagcctcccaagtagctgggattaaaggtgcacaccaccacgcccagctaatttttgtatttttagtagagatggggttttgccatgttgctcaggcttgtctcaaactcatgggcccaagtgatcctcccgcctcagtctcccaaagtgctggggttacaggtgtgaaccaccatgcccagactgctaggaatactttaatcccctcactttaaaggaggaaactgagtatagagagacctgctaggggcaaacagtgtgtggatggcagtgccaggctcaggacacagccctgagggctcagaaagtagtagaaataatggaggcaatgtggcctggcacggtggctcacgcctgtaatcccagcactttgggaggccgagacgggcagatcacgaggtcaggagatcaagaccatcctggctaacacggtgaaaccccgtctctactaaaaatacaaaaaaaagccgggtgtggtgacgggcgcctgtagtcccagctactcgggacactgaggcagaagaatggtgtgaacccaggaggcggagcttgcagtgagccgagatcgcgccactgcactccagcctgggtgacagagcaagactctgtctcaaaaaaaaaaaaaaaaaaattaaaaaataatagaggcaacgtggtgcaaaagacaggcatgtgggctctgctgccttctagctgggcgaccttgggcacgtcatttaaccctcctatgcctgagtttcttcatccgaaaatcagggcttctgtgaagattgtgtcacatgagcacagggcttggcacaacactcaaagccatgaaccacaagctcaggagagggagggagggagggaggtgctctcacacgtaccttgggcactgcaagggccttcttagctcatgtgatcctcccactgcccctcaaggcgagacgcagacccgttgtatagataaagcaatggatactgtagttaagtgacttgaactaataagagcggaggaatgggactgaggtccctctgtccgcagcagagagactactcttaactgccacactagtcaccaaagggcagagtgaggcatctcagctcaatgaagggaatcctcaggaccacctgggtaccctgacaaattctccaagactggggcgagaccagcggctgaggagggcgggcctatgcacagcctcaactccgtgggacttctgcacccccagcttccccatggggcctctctctatctcagcgccagcccatcctgtctcagcacaagatccctgagcctgccccaggggcagcgccagcctgcaccccatcaccagaggccctcgctcccacacccggaccacctctaatccctagcagcatccctcatgggccaacaaggagccttcctgactccagatctggccccgccccttcctgctcaacactctctccccaaggtaaagcacaggacaactgagtccttcagagccccttccccacctgctgccccgcagcccctaggctgcctctgtcccaacactcaccacaaccctctgtacttgctaggtattagtcacagctctaggccctgggatagagcagcgaatgagacaagttctaacccacatcttgccctaggcacccagtttgagtcacatctgaatctccaagtgcctgacacaggtcttgcccagaaacccatgtcaggcaataccagcgaatgaacagggcttgtctggctgtgtacacagaggctgttgcctccctgttcaacctgacaaacacctcccaaaaccccagctcctgcccctcctgccgctcctgctgcctgggatattttctgggcacccaactcctatgcaaccccatctaatgccacctctgccaggaagccttcctccagcctcctaaagctgactcagtccctcctttctttggtagtccctcattgtgggaatgactgtgtccaggtctatctcctccatcagactgggaccgcctcccagtgccacctgagagcacctgactcatatctgtgcttctagaatgtaagggccagcaccatacagctttggtaaatatttatggaatgaataagtgaatcaacccatcaagagataggtgaacatcaggaagggaagaaaaatacaagctcccaggccttgaggagaagcagggaggagagtgaagacacttgaagctcccagggtcacagctcagctctcctgacctcccctccctgacctttgcaccctgttccccaccaaggcccccaactcttctgcctccaggaggcttcagggattgaccgcacaccacagcacagagggtctgactgctcctagccaagcccccagggctccctggggaggctgttaggaggtgtctggtttcccgtctgcaggccatctgtccctccacaacaggatcactggccctgctccagagggactcgaggtccattttagatcaggagttccctagggactgagggaactgctctgcgactcactgctttaggtggccctctaacatcctgcaaaaccctcttgtaaccctctctgaatgtcagcatccacagcgaatagctgacacagctcagagttactgagcggctccctcactaacaatgagtgctgacaggccacggacttggccactgtgaagagcatggctgcctggcatgtccagcctccaggccagccgcttggggaagcctcctgctcgccaggccctgtggatcaccccctccctgacctcctaaggcactggaagcccattgtgcctggcaggagtcagcatggtgcagcagagagggcaccagctccgagcctgacactagctctgccggggactcactgtgtgacctgcttccttaccctcaaaagggggaaataagacaaagctcacaagggtagccgtgaggtctaaagaatgacgcttggaaagggcctagcacagtgcccggtgcagaacaggcaatcaataaatacttgacatacaaaggcccctctgcctctgatttggtgaaatgcaggagtggcacccccagggctacaggacaacgtccctgtctggtgcttgggtactgagaggtctggagcttcagaacacagaggtcaagactcaggctctgaaggattagagacatagcttccagtcctggctgtgccgggtgcttgctgtgtgaccctgggcaagtcgcctcccctctctgagcctcagtttccacaacttcaagatggacactgagttggcattgttgatacatgttgttggcaagggtggcaaaacaactgttctggcaatcatgattcatcaggattgaccagagccagatactgtgcaaagagctgggttaaatctggccctgagggcagtctgctccctccctgctctggcagcatttaggatggtagcaccttgttcacaacctggagttgctgcgtgcaggaatcccagcccccactggcctatgcgctgtgccagccaatgcatccctccacctcacggtgggagctaggactgggctcagggcagcgccactcccaggcccccatctagggccactcaccaggatggttgtgaccaccagggtcttgttggccagtgtctgcgacaggttgatgtccagggtggtggcattcatggccagggtgcggttagagtaccacaccccaatctagggggcagagagggtgctgtcagctcaggccctgcctgaggtcatggcagcctctgggcccgcccccaccctcaccccagcagggctctggcgtcaccctgggtctgctcacctcacggtggccctgccgggacttttctaggatgcgcagggtgtagttggttctctgccctttgctgttgaactcgacccgcccggtcagcccatcatactctacctggcagggtggggaggtggggcagagggagagtgcaggggcccagagatgggcagggaaggcccaacgtggtgagacatccacagagaaaggcacagacagaccggggtggaggggacaagagagagaagaggaagatcacagtcaaaagagcaagataacatgcaaggaagcaagaggagatgggacaaaaggcatgaagagggcaagactcagaaagagagagagagagtaacccagataggcagcaacagccaggagtggacaggggaggcagtgggtacggtgggaagagcagggagggcagagggccacagggtggtcacagtgagcgctcccacctgaggtggccgtgtcctgcctcctccacccatccccgctcgggctcaccatgcgcaggtagttcatgaggctggtcccgtggggccaaatgttggccgatgtacaggccagaggcttcacaccgatctcctggctgcggttcagctctcggacagcgctcaccaccacgtgcacggcgtcaaacatcagggcggctgacagctgcggtgggacagaggcgggggtgggatggataagaggctgcctaggcagaggagccccaaaggcccctgagctgccaccctcaaaccctcaaataacttccctctccccaggaatgggaaactgggtgggtcaggagtgaggaagtggctctggtgtctttcttgggaagtggaattgacagcggggaaggtgtgtgtgcttcccatgtcttggtgggagtaggtctcccagaatgtatgtggccatgtatctctcagagggtgcctggatagctagctgtgtcacctgcatgggcaggtatgtctgtgaatctgggtgatgcaggccagggaagatggccatagtccccgtctgagtgtgtctggggcacgtttacatgagtggggctggacgaccatgcccattcatctatacacagcttgggtgtggtgtcagagaggcaggagcatataatgattggtcgcgggcctgggaggcaggtggctcagagctagaggcctggctctgctattttctcattctttgatagggctaagtcctcattcctccctgaacctcagtttccttctctgtaaaatgaggataatagtaatctctaccttcatgtgctgttacggggctccggtgacataacgcctgtaaagcactcagaacagtgcctggcacacagttagcgtcccatacactctagcccccaatctgtgacacaaccacggtgtctgtgtgtgcttgttagggtgtgccccagctgtgttagtgtgaaggtctgagtatctgtgttgtgtagatgtgcacaggggtacacacaaatgtgcctctgtgttggggtgtgtgatgtccctgtgtggacacatctgactggacagcttggtgtccatgtgtgctctgcgcgtagaagtgtcttggtgtcttggtatctgagtagatgtctgtgaacaaatacacataaatatgcatcttttgtatgctggtatttattcaacatctattatcagacacctgttatgagctaggctgttttaagtgctggggatacaatggtgaacaaaataaacagaaccccctgccctcatggaacttacagtcctcaaatccatatctctatgtaagtctaatatacagtaagccacatcgtgatgaaataagcaaatataagtgctatggaaaaagacaaggcagggaggggtgaaaaaataggtagtttaccttttttttttcttttgagacagagtcttgctctgtcacccaggctggagtgcagtggcacaatcttggctcactgcaacctcttctacctcccaggttcaagcgactcttgtgcctcagccacccaagtagctgggattacaggcatacgccaccacacccagctaatgtttgtatttttagtagaaacaggattttgccatgttggccaggctgatctcgaactcctggactaaagtgatcctcctgcctcagcctcccaaagtgctgggattacaagtataagccaccatgcctggccaatttacttttttttttttttgagacggagtctcgctctctcgcccaggctggagtgcaatggcacgatctcagctcactgcaacctccgcctcccaggttcaagtgattcttccacctcagcctcccaagtagctggattacaggcacctgccatcatgcccagctaatttttgtacttttgtagagatggggtttctccatgttggccaggctggtcttgaactgctgacctcaggtgattcacctgcctcggcctcccaaagtgctgggattacaggtgtgagccaccgcgccgggccaagtttaccattttttaaacaggaggaggaaggaaaaatcttatacctgaggggacactggagcaatgtcctagtgatggggagcaagccactgcttctctcggaaagtgcacaggaagcagggggaagagggtgtgcagaggccctgaggtgcacctgcttggggcatcagaggcacctcgaggagctggtgtggccagagtggtgtgggaggtagagagagaggaggacatgggtccaatgcatcacaaggccacaccacgaggcctcagggagggcgagagggttctgagcatgatctgagtgaggtctgaaagggggccccagaagtatctgtgcagagtgtttctgggtgtgactgggtatctgtgtgctcaccgcagggcccaggtaggtgctggcttcacagttctccctccaggacatgttgaggctgcggacaaactcagggtagaaggggtgggacgtgttgaacatggagaagcccaggatgttggaggagtcctccacaataccgtccagatgcaggatggggaagtcctgggaccaggaagaggtggtgaggcctggggctaagccctaatgggacagctgtgatgggaaggaagtgggggcagagatgggccagagggcatacacaccatggtggtgaggatgtacttgtaaaacgctgaggtcattcccagttccgaggcctggaaaacacaggaggcaaagaggcagagtgagagacagagacccacaggcagagatggggaggactcaagagaagaagagagatttagagacagccctggtgagaagacactccatgggaaacacagtaaagtaataaatgctcagagatagacagacagggaggaggagacaagtgggggcatagggaggccttagtccctggtgtcccgccatgctgactgctgtcccaggtgggacattttgctagaggagagattttgctagaggagattttgctagaggagagaataggactcccaaatgtcccctgtctctcatgaaggcacttagaagatttccttctggagataggcaagaagaagcctcagaaatagggcaggaaggggaattatctttttttttttttaaagacaagatcttgctctgtcactcaggctggagtgcagtggtgggatcatagctcactgaagccttgacctctcaggctcaagtgatcctcccacctcagctcctgagtacctggaatcataggcatgtaccacaatgcccagctaattttttaaaaattgtttttttgtagagatggggtcttgctatggtcccaagctcctggcctcaagcaatcctcctgccttggcctcccatggtgctgggattataggtgtgagccaccaggcccagcagagaggagagccttaattttaagccctacactctccaaaagccaaggttgggctgcaaatgtgtaggactcagcctaggcataaggtcagaaaatcgattccctgcaatctttaaaagtgctttgcaataatagcagccagtttgaacgtcaagattcattcttgagacccttttctcataatcctcgaggaaaacaaagctggaaaaattcttcctgccagaagcacccaagtctgtccccccacgagaattataacattaaagggcaccagcttgcatttcctgggtggcaggagttgggctctcatcacgtgggtgtcagggaagggcaggcttggagagggaagagacaactgttcacacggctggcacgggaggggccgggatcccagcccaggcctgcctggctcccaaacctgaaacctcctccttaagccatcctgtctcaagaacccagtggattctgttcacacttcctgcgggctacagtcagcagtgatatatgggtttgtttgtttgttttttgttttttgagatggagtcttgctctgtcacccagactggagtccagtggtgcaatctcagctcactgcaagctccacctcccgggttcaagtgattctcctgcctcagcctcccgagtagctgggactacaggcgcccgccaccacgcccggctaattcttttgtatttttagtagaaatggggtttcaccgtgttacccaggatggtctcaatctcctgacctcgtgatccgcccgcctcagcctcccaaagtgctgggattacaggcatgagccactgcacttggctgacatatggttttaattaaaaaaaaaaaaaagtagagaaaaataaataatacaaatttggttattggccgggtgtggtggctcacgcctgtaattccagcactttgggaggctgaggcaggcagatcacgaggttaggagttcaagaccatcctggccaatatggtgaaaccccgtctctactaaaaatacaaaaattagccgagtgtggtggcaggtacctatagtcccagctacttgggaggctgacacaggagaatcacttgaacctaggagactgaggttgcagtgagctgagattgtaccactgctctccagcctgggcgacagagcaagactccgtctcaaaaaaaaaaaaaaagaaaaaagaaaaaaaatacatgcaaaaacaccttaacacagagctcaataaaaaatgtttaaaaatccttcagagctacgatgtagccagatctgactcggggccaggcactgccctgcatactttacctgcccctgcccacagccccttctctccccatcactcgctctctgggcttgagccacactgcctccttgctgttctgtacacaccacagtcttgctcctgtcctgcagcctgaacgctggctgttcccttagcctcactcattaaccctcacaacccaccgagcagggactattcacagggagatgcggtgactgctcaggaccacacaaccaggaagcaggcaggctgagagacaaactttacaattatcatcttcacggaagaagaaggtcttgaagcccccttttgactcctgaggcccatgggcattgggtgacttgctcggtcaccccaagtttctggccccagtcctttgggaaatcagaggtaggggcctcaccttacggaggatgaggtgggagatggaggcgttggcgtcgatgatgatggtggacaccttgtcatcacggatctccttgagcagtggtgtggggtcccggctgtcgtccaacatcctcactgacagcgtctccttggagatgaggaagccacgcaccagttcctccaatcgcagcaggcctgagggaggggtggggccttgggttggagcccttctgggtacccaggcatggcgtagacactctctcctcctcaacatggggcagctgggcagaggactggagggtgtgcaaggacatggggcagctgggtcccatggggtaatgggcttggggacccaaagcctgggccctccccaattaaaatcccaacctagacctcttcctagaactccagattcctgtctctgccaccttcctgacccctcattgggtgtcttgacaggtatctcatgcttaatctccttgctcaaccaccacggcttccccatgttggtgaacagcatctctagtgtgccagtcgctcaggccaaaactctggcttcctctctttcacacccaatccatcaaggccctcccttccaaacacatcagatcccctcacgccgtgccactgtcaccaccctgtcctgagccaccaccaactcctgcctgctgcaatccccaagcctgcccctgagtctgttccctacacagcagccagaatgatacgggtcagatgtgctcctcctctgccccaaaccctcaaatgccttcccagctcagtcagagtcctagaggccaaagtcctcacagcctccaaagccacacaatctgcccaactcaaccccttgttactgcccagactgcgggaattcaagaccagcctggccaatatagtgagaagccatctctttaaaaaaaaaaaaaaggtacttgttgagcatgtgctctgtgccaggctctgctcttggtattgggggtcagctgtgagtgaagcagaccaggtacaggatgaggagatgagttgggcaacaaacaccgcaaataaatgcattacatggttagaaataatgagttctatgttaaagcagaaatgagttatgaagactgggagtctagtgtgggtgtggggtgcaactttaaatgaaatggtgggcgggggcctcattgagacactagagtagagactgatccctaatagcctaatatcaagagccaggcctggcacatagcagctgctcaataaataccttttttttttttttaaccatccagcccacagctcctcctctccccatcactcactctctgggcttgagccacaccacctccttgctgttctgcacacaccatagtcttgctattgtcctgcggccttcacgctggctgttcccttggcctagaaccctctcctctcacatccttacacagctccctccttcccctcctccaggtctctattccaacatcaccttctcaatgaggccctcgcccaccatttcatttaaagttgcaccccacgcccataccattcttcataagtcatttctacttttccatagaactcactacttctaaccatgtaatgcacttatttgtggtgttttttgcccaagtcctctcctcagaatgtacttggactacttcacccacggctgaccccaataccaagatcagagcctggcacagagcaggtgcttaataaatacctttatttatttatttatttatttttttgagacggagtctcgctctgtcgcccaggctggagtgcagtggcgtgatctcagctcactgcaagctccacctcccgggttcacgccattctcctgcctcagcctcctgagtagctggcactacaggtgcccgccaccacacccggctaactttttgtatttttagtagagacggggtttcaccattcacaggatggtctcgatctcctgacctcatgattcgcccgcctcggcctcccaaagtgctgggattacaggcgtgagccatcgcgcccggccataaataccttttttttaagagatgggatctcgccatgttgcccaggctggtcttgaactcctggcctcaagccatcctcccaccttggcctcccaaagtgctgggattacaggcatgagccaccacacctggcccaataaatacttcttgaaggaggaattccttctagaggctatggagcacagttcctccttgcctcaagctccatacccacaaatccaccagcctaccagacatctcacatgaatgtctcaaagacacaccatgcccgacgtgtgccccgatgaatcgtgttcctccttggcaaaggccttgcaccatccctagccccaccctcttctttccctcacgcctctcacatcaccctggccccctcattccaactgccaccacctgggcccagaccagtgtcgcctctcccctgcctttcacttgtctccttgccacccctcttgtcactctccagcctgttctctacactgcagccaaagggctcttcctagaacacgaatctgaccctgtcccctcgccctgcccggcgtggggacttcccatggctcccatcatctcttgcttcgttgttctcacatttcagccactgggagtatctgcaagcctcttgaagggctgtgctccctgggccctctacctctgcccgtcacactttctacttagaacctgttccctctttcttcccacacccttcaggttcagcttggatgtctctttctcatagacacaggctctgaacctcccagatggattaggatccctcctatgtgataccagaggctccacgtgcctcctggcagcacacataccactctgtatcacaacagctcaatgaccaatgacctccactagaaccggagttccaagcacccagggaccacgcccagggcctagcagagggccttgacatggcaggtgcttagtcaccatctggggactaaatggatctctttggggagagaaggggtctgtagaaccagaggcctcggtttctgaagatgggagaagagcctggtgcctgggtgccccagggttctaactagggggcagtgaaccactgtgtgggacaccagatctcttgggaaggggtgtctgggggaacagaaaacaaaacattcagttctccctcacactcagccttggcgcagatgaggctggccgaggggtagttgaaggacttgaggattcgggagaccgccaagctgacgtcctcgttactggggtacaggctgacagacgcgaagcgaaggtactgaaggcggggtgtctcctcgggacccaccttgatgtgggggatctggacagagaggaaactttggcctccatcctgcttctccgcccagccctcgcctcccagggacccgctccccacaaagcgccggcccacactccccatctcacctccttctctccacagatatggctcacggtggaggcagatgctgggctagaggagggcccaaggacagacacaacccctttgggtaagatctgacacactgcgtgggaaggggaagagaccgcagagtcagggaccccctgcctcctctccttccccatccctcagggagccgccatggcccaggagaggatcagacactggcaactgcctgatcctcttctgccatccgggacccagaaggccagtctctgaccccacccaacaagtgaacatgagggggcatgagatggagagagatgaggacacagcaacagagggacaggtcaggccaagggagatcaaaggaagggatgaagagaaagagacaccaggggcctcctctgcctacaaagcctgtgcctagtccctcagccactgttgttctcaaccttttcagccatgccacaacccacggtgcactcaccacctcctcccctgaccccacagcccaggtcccctggagccttcccatactccaaacaccactctcccactgcacttacttcctcctctttcttctgctctcttcctccttatacacatgtgtgtctcaagactgggaggtggaaagctgttgtttttgcttgtccagtgcctgttctcatggcagaaccctaacttctcctgggggaactatcctcacccttcagtccagggttcccaggattgactggcacctgatgcaggccttggggagtcacagaactccattcttctagccatggcaactggttcagaaatacatatgggtgcaaatcagaccatggagcaccttccccaggtcttttgctacaattatcactgggtttgctaaactggtgagatgtaagcttggtgctgctggggccatctcaccaccagttgagagagcatttctgaaaatgaagccaactcagaggaaagcaggcctcagaggtaaagacacagagattcccaggatgtcatctgaatgcctgaatccagccatgcctgaaacaatcctaggccatcgtttgaacacctggattcagccatgcctgaaatttgtccttaggtcttttagtgacatgagctaataagttctcttttttccttaaaccaggctgagtttggtttctgccacctctaactaaaggcatcataactcaacacctcatttcctccaaactggctccttctggaccttccacactggtaagggccccaccattcacacagaccagatgcctggaaatggtccttgccttcaatctctctcctgacagccagttagtcaccatgtcctgtctcttctttgtcctcaaatttctcacatgtatccccttctcttcaaccccttggcccctgacctagtttaggactctcaactcagacatatatcagagtacacactcatcacccaaatccagtctccagattctctttccagaagcctcactccctggtatagacctatcaatggcttcccagtgcctgtgggtgaaggtggcatctttcaccctggcactgtagcctccttgagccagcgtgacaatctgcacagcctcgcttcctactaccctgtcacacttagctctgaagtatctcacaatctctccaaatatgtcctgaatccaggtggattcaggatgggctcaaccccatacccccccatttcttggctccaaatacttccctctgctcccaccccgatccccacctcatctccagactctaggcacatgactggaatgccatctgcctcctcaccctccatcccagcttctcccaagttgtactctgtgccacatcagccaaaaaagcctgtgaaatgccataccccattcttcctcttactgatctgaaacatacacgaacaccataaagcctctgataaggcctgcaggaaagaaacctgtctaaaacatgttttaaggcagcatctcccaaaggtctaactccagcacatctgttcaagtgacaccttcgaacattcagcccatcagtattccatagacacttccacacccctgtgatgtggccggccgtgcttggagccacgccactctttctacatcctgttcacctttcagagctcagtttcagactagccttctccagaatgcctttgctgaccctcgcccaagcctcctgccctccatgcctggggcttgttattaagctctgggggctaacaagcatccccagccagctgggatgatagggcttatcttttcaacgccgccccgtgctcctccagagcagaactggggcttatgctctccctcctctccaacccccaggcccagcagcagccatgtctgggaagaaggcagagacaaacacaaagaagggggaggatggagctagaagaggacaaggccaggccagaggccaggggcagagggatggactgagggccaccgacctgccctgcctcaccccacgcccccatggccccgctcactggtgtccgtggtctcgtactggctgtcccgctgcagctcaaagatgtctacttccactcgggccttggctgggacctcgatgatcccgttgatctgctcccgggccaaggccaaggccagacgctcaccgcggccacacactgtctgatcatccaggattgcagctgaggggacacatgggttggggaccagactcctgagtcctgaggaaggagggggctgtggtcttagactccagggctctagggtgaggtgggtatacggaccaggggtctagacacctggatctgaggttggtgggagctaggggtctggactcctgggtcctgggggaaggaggaactggaggctgggattccttgctgctgaagagagctgagacctggaccctgacggactggcatgcctgggtccccagaggagccccagggcctgaggatgcaggggcagggtgcgggagggcctcacccatgcgcagtgatgagagcacctggcagctggggctggcgaaggcaacaatcagcagcagcagcagctcagccggcatcttcctcccctcctcatggggacgcagctgccgcggcccccactcgccacctgcagggagaccccccagaccaaggggagattactatgtggtgggatggaaccccttggaggcctgctggatggggtggtcacagaagccttggggacattgttggcaagcagttcacagctctgcagagccctgctctgtttagaagctggcaatactgagggcattgcaagaagggaagctcagctcagaggggcactaccagggtggaggtcacagtgctcaggcgctgagtaggacaggctgcaagagagaggatgggcacagctaccaaaacaggagggaggcgtgcgaggttctcaggtaggagtgaattcctgggaccagccccacccaaataggaaaccaggaagtgccaccccccacccagtcccgcccctgtctctgggcaggcagccgttactaggcaacagaaaccggctggagaggatgcggtggttgctaggcaaccccatcccaggcctcacttgccactttcctaacatccccagttcccacaatcccatggggagagaggcctggacatccgaggtctggaggagagagtatctgggagttaggaaacttcgggagagatggagagatggagaaaaagagagagaggcacacacagaaccccatagatgaatggacccagagcagtaaaagggggaaaaaaaaaaaaagcaaagagagagaagggaggaaacagagaaagtgaaagagaggcttagagaagggaaagacagagagactcagaaagagagaaaggtcaaaatagatagaaatacaagggaagagaaagacaagacaataggaaaatgggggtagaaatggagagaaaagaggagagttacagggaggcagggagaggactaggagggagaaagagggaagagacaggaggatgaggaggcaagataaagaaaggacagagcagggagcggaggaaagaggggcaggctggaggtggggaaaccaaggcacaggcgagacacaggaagagggagacagaggatggagaaaagataggaaccgactcggatacaagcaggaagagctggaagggaggagtgagtaaggcagggagtggagctgcctgccagaagtgggtgccataccactgccccccaccctactggggagaagaagtaaagggggagatggtgcatctttgctcttcacaactctccacccctaaggagtcagggattcctctaggcaccccagctttctgcagggcaaccactgggcaaggagtttggccagatgcacagctccacttcccctggctgagggctgtgccccacgggaagggatgcttgggtttccatggagtagggttactgtggggggcacagaatgctgtgaagtgggcctggacaccggaccccactcagtccccatggaaggacagcttgagctggtgaaactgtggaatgagaacttcgagggaaggatagaggcacaagtccttctcaccatctcaagtggcctgcaaaacctaggctggggatcagtcccagctctgcccctgactcactgcgtgatcttgagcaagtcactgccttctaggcctctgagaagaagagagtgctaggtgggagggtatgctggacaggctggggactgcaaactataatgtggattaaggtgaaggcttgtcaaggatggaggcacaagggatgctgggagacccggaggagcgctcagagtgggaggagtgtgaagggcggagctaggagagaggcaggagtggagtgggtcatcctgagacaccagggactcctggggcaaatcagggagcagaggacaaaggacagaaagaccgagggagagatgggacagaaggacagggacccacaggtggcagccaaaggtgggagcagacagagaaagacagggttgaggggcagcaggtggacacagagatacacacagaaagacagcccaagacgtaggaactgaggctaagtgagagagcaagagacagacacagcctagaagtgagacagcaaaggagacagagacagggcaggtagggtgtcaggcaggtccaggactcagccccagagactgggcaaagccagataaaagtcaaaacccagcagagagctgagcaacagtgggcataggagagacatcagcaaaggtgagaggcaaggagggccagcgaaggcacacagggtgagggagaaggcaaagggagataaagaaacagcagcaggtacaagacttgggagaaggaaagaaatggccaaactctacaaagagagagggccagtcggaaagagagacagtatgtcggagctgcacgacaggcccatagaagaggaaggggcaagggggaaaagcacctgggagagagaaagggggagtcagggagggaaactgaggtggggagatggagtgagtgcactagaggggcacaggcagggacagggcaagcacctgcaggagaggccagacccacacagaggcatagccaccccaagacactcaggaatgccgtgtgggggagcaggagatcctggggcctgaaagcccccagacatggagaggaatgggagcagaaaggccacgcgaggtaacacagaagtcgggagagagaatgggagtggaaagagccagaccagccaggaaaagtcagcatggaccacggagaggtggggcagcagctgaggagggagggactgaggagccgggcacccagagtggatctgggggaaagaggtggaaaagtgacagagggaagacagcctccaagctcagaggcagagagagggaggaggacaggtgagcggaggcacagaatagaaagagaaatggaaagagacctgccgagggagacttggaaagagggaagccagggtggaggagttctgacagagagagggatctaaacagagacatgccgagagcaacctgggctaacagcaaagagagaagttgggcagagtcagagaggggcccaagagacacaggaaatgggggctcaaaagcggaaagacatatccaggagatagagactggacggggtggggacagggccaaggcccaccgcaggcagaggatgaggctcagaggaacagaaagagccagtctgggaccaggacggaggcttggagacagcaggggcacggacatgccaggggcccggggtaagtgagagcccaagtaagagcaatcagccccgtaggaccccagaaagctagagggccaggggcggcagtgagctatgtacccagaagaagaggtgagaagaggtcgaggtgaatggacgctgaggagatggagggcgcagagcaggcccctagtgggggagggtacttgccagtccggagaacggggagaatgtggtgcccccctgccaggcggcaccagagcccagccttccaggacccagaacccagcccaatccctgccctgcagacactcacggatcctggtgggacggagggctgggctccctcgaggcccgaagaccgacagcgggaggtgctctggcgctgggtggtggtggggctgggcggggggagagggcagtccacagggccccctcccccgccgccggtggtggctcccaactaatccaaaacggtggctccacaggagcagggaggaaggacaggtggaagaggagagggcgggccggggaggggaggaaggggaaaggagaaaatggaggagagaaggggagagaggagagggggaaggagcaaatggaggggaaggagggaggaaaggaggagaggaaggtgaaaacggaaggggggggcacaggcaaagccgggggagggggaagctggcccaggaaagggcccccgccccctcccctagccgggccggcctgggggggccacagggggcgaggactgggtggagaaaaggaagccggccatcaggagaagtgggggaggggagggcctgctgggggagggggccgccccctttccccctcccccctggagcctgggccctgccctggttgaggcaagggcccggagtcctcaagccctcagcccccacgggaaaagcatgctgggggcggggagagcccgggagtggagagctggggaggatggagagctgggagacccggagaggccaagaagggggcaaatgaggtggagagatagggaggagggagaggaggatggagaggagcaggtggaagagaaaggcggaggagggtggggtgtcccaggggctcccggtgctgggcctcagtgggagggcctggcgacacactcctggtcccctgtgaggagccggctccagtccccggctccagtccccggctgggcctgcctccctgccgctggctgccgccaccgctcagtctcccctccgaggccgccgcctgcctgcccgcctgccgcctgcgctgggtcctggagcgcagtggggtggttcaggagagagagaagagggagggagggaggcagggaggagggcgggcaggaggaagggagggaggcaggcaaagagagagtagggaggtgagtcgggggagggggagcctgtattggttggggctgggggccccccgcgaggagaatgctgatgagaagaaggagctgcattggatggaaggcccacccccgagccaccccctctaccacaccatgccaccgccctgcccaggcagccctgggcacaggagcccacagagatgagaggcaagaagacccagggagaaggccactgagatgaggggagagggctacagagatgaagagaaatgaagagaagagagacagccgtcaagactgtccagagaagtgggctgaggcccacaaaccccacaaggacaaggacaggaaaagcccagggataagaaagaaaggcccatggagacaagggagcagcctacagagacaagcaaaaggacctcggagacaaggggcagtaatgtggacatagagacctcccgcgaaggaaaacgggagaagccagagacacaagagagaggcccctggaaacagaaagcactcctcagatatggggagcggtccacagggcagggagagagccaaggagagccgaagaaggtcacagaaacaagggaggcctacagacaccagggtaccaaaaagacaaggatgtggctcatagacacaagagagccactgaggcaggagctgccagcctggagatgcggggcaagcctcccccaatataaatagctcctatagaggtgaggggatgggtggtgagtatgagaattccctatagtgcacagagaaatccttgggacccacagagatgagtgggtggagagaaggggccctcattctctagtcacaggagcagagaggcagtgggaaaggtggatgggacaaggagaggaagctggagggcagagccagaagtgggagactccttcccagggaacaccctgcagcctctcagaaggagctgagcaggacagggggatggaagagagaagcgacacagatcttggagtgggggtgggtggtgcatggctgggtggggggtgaaatttggggggaagaaacatgacagttggcgccgaaggctgagcccgtgactcaccaccacccccgatgctcgtgatggggaggagacactgacacactcacgtgcggcccacagcatatgtgaccgcatgcctcgaacacacagctggcacatggcaactcctggaccacatgccagcccagcacaggaagccctctgcaagctggcatgtggggcatcctggacacacatctgacacatatatctgacgctgaaggaccaccaactttgcacacacctccttaccccacttggtcaacatctacaccgccccctcaaacatccacacttaactccagtcaggcctaaaagcccagattcacacctgcctctgggactttgcttatgaaggacctcaacacagaacaccatcctttcgaccagggcggtggctcattcctgtaaccccagcactttggaaggccggggcaggtggaccacctgaggttgggagttcaagaccagcctggccaacatggcaaaaccccgtcactactaaaaatacaaaaattagccaggcccggtggcacactcctttagtcccagctacttgggaggctgaggcacaagaattgcttgaacctaggaggcagaggttgctgtgagccatgatcatgccactgcactccagcatgggagacaaagcgagactccatctccaaaaaaaaaacaaaaaacaaaaaccaaccaccatcccctctaaattcaacctgtcccggaaatcccagccagtcctgcactaccacctccagaaagacctcagcttatcctcagcttattcctatatgatctggagaaaagagacctgcaccacccaaatcaagttgagaagtccaagcaaaaggcctgagaagttacctggatcctcaaattttctttttttttccttttcttttttttttttttttgagatggagtctcgctctgttgtccagactggagtgcagtggcatgatctcggctcactgcaagctctgcctcctgggttcacaccattctcctgcctcagcctcctgagtagctggtactacaggcgcccaccaccacacccggctaactttttttgtatttttagtagagacggggtttcaccatgttagccaggatggtctcgatctcctgacttcgtgatctgcctgcctcggcctcccaaagtgctgggattacaggcgcaagccactgcacccggccaggttttcttttcttttattttttctttctttcttttttttttttctttagatggagtttcgctcttgttgcctaggttggagtgcaatggcgccatcttggctcactgcaacctccgcctccggggttcaagtgattctcctgcctcagcctcccgcgtagctgggattacaggcatgcaccaccatgcctgactaattttgtatttttagtagagacggagtttctccatgttggtcaggctggtcttgaactcctgacatcgggtgatcggcctgtctcggtctcccaaagtgttgtgattacaggtgtgacccaccgcacccagcctgatcctcagattttcaagtggggaaaaggaggtttcagcagaagcaagaatctgcccaaggtcacacagcctgtcaaaaactgagcatggcttccacttctctgtcacctaccccaggtgattttgccctaagggcaaacccagactgcttcagagcaggccgagcctagctttagctcactaatttccaccaactctttcctccacttcttgcattcaacccttcaacatgcaaccacttgaacttcctgcctggcaggcaggtgagcctgggggccaagaatgtagactgtaaggtcaactcctgggttggaatcctgactcttcctaactatgggaactacgactagttacttctctggggcctcgatgttttgtagagtcagcatgacagtttctctctcatagggttgttgagaggattaaactgagtaatgcatgtaagcattgagcataatacctagcacgtcataatacactcaagagatgttagttattattattaggctcccggagatactaataaaaataacaactggccagacacagtggctcacacatgtaatcccaccattttgggaggccaagacaggaggatagcttgagcccaggagttctgagaccagcctgggcaacatagtgagaccctatctctataaaaaaaaaaaaaaaacccgggcatggtggctcatgcctgtaatcccagcactttgggaggtcaaggtagatggatcaacttgaggccaggagttcgagaccagcccagccaatgtggcaaaaacccatctctaccaaaaactaggaaaaattagcagggcatggcggtgtatgcctgtaatcccagctactcaggaggctgaaaattgcttgagcctgggaggcagaggttgcagttagctgagatcacaccactgcactccagcctgggtgacagagctagactgtctcaaaaaaaaaaaaaaaaaaaaaaaaaaaattagggactgggcgcagtggctcacgcctgtaatcccaacactttgagaggctgggtgggggggtggatcacctgaggtcaagagttcgagaccagcctggccaacattgcaaaaacctgtctctactaaaaatacaaaaattagccgagagtggtggtgtctgcctgtagtcccagctactcaggaggcttaggcaggagaatcacttgaacccaggaggcggaggttgcagtgagctgagatcgtgccactgtactccagcctgggcggtgggcgacagagtgagactccatctcaaaaaaaaaaaaaattaaattaaattttaaaaataggccaggtgcagtggctcacgcctgtaatcccagcactttgggaagccaaggcaggtggatcacgaggtcaggagattgagaccatcctggccaacacggtgaaaccccgtctctactaaatatacaaaaattagccaggcgtggtggcgagcgcctgtagtcacaggtactcaggaggctgaggcaggagaatcgcttgaacctgggaggcggaggttgcagtgagccgagatcgcgccactgcactccagcctgggcggcagagaaagactctgtctcataaataaaataaaataaaataaaataaaataaaataaaataaaataaaaataaaatgagtaactcctagatgtcttttactctctgcctcacatgagatgaaatggggctcacatgaaatggggctgttattagccccatttcacagattagaaacttaggctcaggacagttgacttgccctagaaccaggattccaatccgggaatctgttttaactatacatgcctggtgttagggaatttaatccatgagaaggttaggacatctagtgaccaaatggccatagaattggccccgggtctcactgtgagacgcatcccatagtggcttcaggtaagtaaataaataacacaattctgagagtcagtttcctcatccgataagttgaaattcctctgtgtttgggttcaaggagtaggtctggaaatgtttcttttcttctttcagatggagtctcgctctgtcgcccaggcgggagtgcagtggcgtgatctcggctcactgcaacctcggcctcctgggtgcaatcaaatctcgagcctcagcctcccgagttgctggggttacaggcacgagccaccacgcccagctaatgttttgtatttttagtaaagatggtagtttcaccaggttggccaggtgggtctcgaatgcctgacttcaagtgaacccgcctcagcgtcccaaaatgttgggattgcaggcgtgagccaccacgcccagcctggaaacgtttctaacagtactggggcaactccctcccaaggccctgaggggcgcaggaacgaggtgagtaggaatggccagagccccttggacacatggggccccaatctcgaggtgtaagggtcagagtcaccccggaaggaggtggagtggagtccgcccgttaccggctcacttccttcaggctctcaccccgattgtccttcaggtcctctacccaccacactccctatttcttccaatgaaattgtccctgcttctttttctccatatcctcgctctccttgcttcccctatgacatttctcctctctccacctcccaaaagtcccctcggtcttttctctgtttcttcctgttgccttcattcccctccttttaataaagtgagtctggaaccttggtttcccttttctctctccatgtgactggtgctgcatgcagtttgccctctccccatcgcgctaagtggtttcactttctccctctgaccctcggggaaaccacaaaggttcccgtgcctccattcccccgctccagccctcaaggtgccgcgtgcctcaatttcccaggctcttttcctccctctccctgtccccaacgctgactccctcacggcgtccccaaaatggcgcccgcggccgcgctccgccgcctaacgtcatcgcgccgccctccgctcagagttcccctctggagccgtcggaggcggagtcgaggaggaggaggagcatcctctaaggaggattaaaggggcgggcactatccacccgagggctgaccggtgagggaacgacgctaaaggattggttgggcgctgcggggaatctcgacgctcctcactattggcccaagcctcagagacatgaacgtcgattggccgaacggcagggcccgagcgggcaatgattggttgcgtccggccgtccgtgcggcggccgaggaggaaggtgggaggggcgttgctgagggtagctgggggcgagagcgaggctacggagcaggcgagaggcgacggcgagagctagagcgggcgcagcgttagggtggccgtgcaaggggagccgtggcccgggcccggggcgtgcgagacggcggaagcaggtgagcgcgagcgggcgcgcagaggccggccgggctgcgctccctgccgccgcggcctcctcttgccaggtcgcctgcgcactgagggcctgagggggtgcgcgccgggcagttagggcggagcggcaccaacggccgacccggcgcgcgggcagccgggcgggggccgggctggagcggcgggtggggaaggggcctggagtcgcgtgcggggctgagtgaggaggggcggggctcgggctgaggctttggtggggcacctgggcgggaaggggaggcctcagagctgtcccaagagggctccgcggctccccagggtttggggtaaaggacttggtggtgtggcaagtccaggacgaaggggctgggccggttagacggcacgtgggtgcccagttaggggcttagggcgtgagaaagataattaagttaatgcaggggaaaaatatctagttcttcctggaaagaattggggcggtgagaggggttttggtgtgaagacattaggaaatcgatatccccaagggaacggtttagagctaaggaggggtccagttgtaatggatggggttaaattaatgtgaagaggccttaaaccaatgtgtcaggaggttgggtacccttggaatgcgtggaaaggagtctttgtacaaagaaggattaagtgtattttaaaagggtgtctgggtgtccctagaatgagctggggaaggtagtcttttttaagtacaggtaattaggccaaggtgaagatgggatttggttattggaaggggaggaagtagggtgggagagatctgtgtgctaaagtgaggggtgcctgggaattcctggaatgagactgagaggttgctaagacgctggggggtctgagtacccccagaataggaggctggtgagaggggcttgagtgtgaggaagaggggtctgtgctggattaaggtggtgatggaggttctgtatgagaataggaggtccgggtatccctaaagggggtttgggcagcacgaggggtgtgtgtaaaaggagcttaagccattgtgaaagatgggtgtgtggatctttacacaaagaagaggagttatgttgctacgaagaggagggtctgagcatccctagaatgggttagggtgggttgggtcttctagcaaattaaaaaagattaggttaataatgtggaggaggatctggatattcctgagatggatttgagggggggctctgtttgcaagagaggcataggttgatataaaatgagggtatgggcatccctgaatgagtggctgtgtatgaacaggaagggtttaaatcaatgggaagaggggatctgggtatctcagaggggattagaattgtcgatttggtcttggtacaaagaagaggtgatgaatgtaaagagtggatagataccctggagacaggagctagggtggtggaagggcctaggtccgaagcggggaggagtaggcttttgtgaaaatgggtctgggtattctggatagggggttagggttgtaggagagggccttgatttgtagaggaggttaagtaattaaacagggctgcgtatcatgaagtggttaaggtgggcaaagtctgggtgtggagatgggttaggccagtgtgagaaaatttgactggggggaagggatatagtttgacgtgaggaatctgggcacctgaggaagagttggtgggtagcaggggttgcgtgtaaaggggaggggtggcaccttgtacagtgctgaaagtggagtggtggggcattgggcagtttgagtggtctgagtgtaaaaagaagtctgagaacctgggagaaggagcagaggccatgggaggggtgtggctgggagaaacaggtggggaaggcctatatggggtttcagttgggtaccttggagaggaatggggtgaggtgagttggtaagaaaaggagtcagtggaaggaggtctgagtggaggttcccatgtgctgggcggaactgtggggcccactgtgaggtgtgggagatgaggggactggacaggttacaaggatctggtgggtggagtttgatgcaagttgatacagaggtgagactgtgggtaaattcctggggaagggactgcctgggagatttgtgtttggtgtttgttatgctgaggggaggaaggattattgggagggaggcagaattttaaaaatcgaaggaagaacttaagggggtgtagatctaaggtattaggagtggagagtgatgaagggaagagctgaggaatcggtgacctaactggtttgtccccactgtctcctcttccagcccagggccttgctgccgccatgactgaggaatcagaggagacagtcctgtacattgagcaccgctatgtctgctctgagtgcaaccagctgtatggatcactggaagaggtgcttatgcaccaaaactcccacgtgccccagcagcactttgagctggtgggcgtggctgatcccggagtcactgtggccacagacacagcttcaggcacgggcctctatcagacccttgtgcaggagagccagtaccagtgcctggagtgtggtcaactgctgatgtcacccagccagctcctggagcaccaggagctgcacctgaagatgatggcaccccaggaggcagtgccagctgagccatcacctaaggcaccacccctgagctccagcaccatccactacgagtgtgtggattgcaaggctctctttgccagccaggagctctggctgaaccaccggcagacgcacctccgggccacacccaccaaggctcctgcccctgttgtcctggggtccccagttgttctagggcctcctgtgggccaggcccgagtggctgtggagcactcataccgaaaggcagaagagggtggggaaggggcgactgtcccatctgccgctgccaccaccactgaggtagtgactgaggtggagctgctcctctacaagtgctctgagtgctcccagctcttccagctgccggcggatttcctggagcaccaggccactcacttccctgctcctgtacccgagtctcaggagcctgccttacagcaggaggtgcaggcctcgtcacctgcagaggtgcctgtgtctcagcctgaccccttgccagcttctgaccacagttacgagctgcgcaatggtgaagccattgggcgggatcgccgggggcgcagggcccggaggaacaacagtggagaagcaggcggggcagccacacaggagctcttctgctcagcctgtgaccagctctttctctcaccccaccagctacagcagcacctgcggagtcaccgggagggcgtctttaagtgccccctgtgcagtcgtgtcttccctagcccttccagtctggaccagcaccttggagaccatagcagcgagtcacacttcctgtgtgtagactgtggcctggccttcggcacagaggccctcctcctggcccaccggcgagcccacaccccgaatcctctgcattcatgtccatgtgggaagacctttgtcaaccttaccaagttcctttatcaccggcgtactcatggggtagggggtgtccctctgcccacaacaccagtcccaccagaggaacctgtcattggtttccctgagccagccccagcagagactggagagccagaggcccctgagccccctgtgtctgaggagacctcagcagggcccgctgccccaggcacctaccgctgcctcctgtgcagccgtgaatttggaaaggccttgcagctgacccggcaccaacgttttgtgcatcggctggagcggcgccataaatgcagcatttgtggcaagatgttcaagaagaagtctcacgtgcgtaaccacctgcgcacacacacaggggagcggcccttcccctgccctgactgctccaagcccttcaactcacctgccaacctggcccgccaccggctcacacacacaggagagcggccctaccggtgtggggactgtggcaaggctttcacgcaaagctccacactgaggcagcaccgcttggtgcatgcccagcacttcccctaccgctgccaggaatgtggggtgcgttttcaccgtccttaccgcctgctcatgcaccgctaccatcacacaggtgaatacccctacaagtgtcgcgagtgcccccgctccttcttgctgcgtcggctgctggaggtgcaccagctcgtggtccatgccgggcgccagccccaccgctgcccatcctgtggggctgccttcccctcctcactgcggctccgggagcaccgctgtgcagccgctgctgcccaggccccacggcgctttgagtgtggcacctgtggcaagaaagtgggctcagctgctcgactgcaggcacacgaggcggcccatgcagctgctgggcctggagaggtcctggctaaggagccccctgcccctcgagccccacgggccactcgtgcaccagttgcctctccagcagcccttggaagcactgctacagcatcccctgcggcccctgcccgccgccggggtctagagtgcagcgagtgcaagaagctgttcagcacagagacgtcactgcaggtgcaccggcgcatccacacaggtgagcggccatacccatgtccagactgtggcaaagcgttccgtcagagtacccacctgaaagaccaccggcgcctgcacacaggtgagcggccctttgcctgtgaagtgtgtggcaaggcctttgccatctccatgcgcctggcagaacatcgccgcatccacacaggcgaacgaccctactcctgccctgactgtggcaagagctaccgctccttctccaacctctggaagcaccgcaagacccatcagcagcagcatcaggcagctgtgcggcagcagctggcagaggcggaggctgccgttggcctggccgtcatggagactgctgtggaggcgctacccctggtggaagccattgagatctaccctctggccgaggctgagggggtccagatcagtggctgactctgcccgacttcctctttggcacctccattccctgttgctgaaggccctccagcatccccttaagcatctgtacatactgtgtcccttcctcttcccatccccaccaccttgtaagttctaaattggatttattctctcgtgaggggggtgctctggggtccttgacacacataaaggtgcccccccaccttccacctcttagcactggtgaccccaaaaatgaaaccatcaataaagactgagttgccagcagtgtgtagagtggaatttgggagtcatgggtcttacctctcgtggctgcatcaccaacacccagaagtgggcctggcaggtattaggggtagtaggagctcagtaaacatttgctgggctgaagagaatgacctggtgttcatgggcatggctctcatagcagggccttcacttcactgctagatggaggtagcatggctctcttgccactagaggtcccatggctctgtggaaaagctcaagagtgtttgtactggtggcaggaactttcagagaaatcagatttttacactcctgtccctgactcctggcctgatgtggaccttgtctcccaaggccatctgattttctcattgatccccaagagcaaatgcaggtaggcatgatctctagagctgtggaattaaaggagattctgaataatatgtgtctggatgtaggaagattcatgagaggtggtgacttgaattcccctggagttggactttggctcagccaacagatttttattgtgagtgatggattgttgggatggctggctaatgtttgaacatctagtcagtctcaagtactatataactgaataatattcacactgattacgtgagaacattttgcagggaaggaatctccagtcaaaagcattgagatgacttgcccaaggtcacattcaatccaggcagggcagagcttgaatttaagcctgatttcatttcatttggtttaatcaccgatatgcttttctctctactctgttgccttctgcatactttggggagggtggtagagacaagatgggagtatgtgactggtgggatgctaggctgctgtgctagccttgcttctgagacccccccccccaaagattattccagatctttctgttgaactctttttcctttttatttttgagttggagtctttgccgcccaggctggagtgcagtggtgtgatctcggctcactgcagcctccacctcccaggttcaagcgtttctcctgcctcagcctcccgagtagctgggattataggcgcgtgccaccacacccggctacgtttttgtattttcagtagagacggggtttcaccatgttggccaggctggtctcaaactcctgacctcaggtgatctgcccacctcagcctcccaaagtgctggaattataggcatgagccactgtgcccggcctgaaagaactccttttttaagacagggtctcactgtatcacccaggctggagtgcaatggcacgatctcggctcactgcaacctccgcctcctgggttcaagcaattctgcctcaccctcccaggtagctgggattagagctgcgcaccaccatgccaggctagttttttgtatttttagtagagacagggtttcaccatgttggtcgggctggtcttgaactcctgacctcaggtgatctacctgcctcagcctcccaaagtgctgggattacaggcatgagccaccgcgtctggcctaaaacaaattctaataattgttcttgtaaaataaatgacataacatttgaaaagttaatgtattagggttctgtttatacaaaaaaaaaatcaggttatgtgcgtgtgtgtgtatgtgtgtatcctacctgttatatgtatataaattacacaatagatacagtaaataatatatatgtatataaagatttttttatagtttgttttactctatagacatacaaacatacattttaatgtttatatacatatatatagttccaaatcctaggatttggagtattctttttaattaagttctagggcacatgtgcagaacatgcaggtttgttacataggtatacacatgccatggtagtttgctgtacccatcaacctgtcatctgcattaggtatttctcctaatgctatccctccctagcccctcaccctctgacaggtcctggtgtgtgatgctcccctccctgtgtccacatgttctcattgttcggcttccacttaagagtgagaacatgtggtgtttggttttctgttcctgtgttaggttttatttttatctttttattaaaaatggggtcttgctgtgttggccaggctggtctcaaactcctggcctctagggatcatcccattttggcctcccaaagtgctgggatgagaggcatgaggcaccacacctggcctgtttttttctatttttcagagtctcgctctgtcacccaggctggaatgcagttgcacaatcacagctcactgcagcctcaacctcctaggctcaagtgatcctgtgatcctcctgcctcagcctcccaagtagctggaacgacaggcgagcaccaccacgtctggctactttattttgtagagatggcgtcttgggttctgtttggttctgactgtgccaccttgaagatgggcctgaaccaaatgatcttcctccatgtactatttttatgtcccatccctgttgatttgttttgagagttgaggggctttgctttctttgtcttgccaaaacactgcaatgctgacactttttgtcttactaaatatgaaacctgtctttcactctattcctttttcctgtgcctcagttcccccaaccctcactatcgactttgcaggatcccagcacctgtgtgccaagcatacattagaggatggaacagtgctgaggaaacgcaacagcttttttttttcctgagatggagtcttgctctgtcacccaggctggagtgcagtggcacaatcttggctcactgcaacctccacctcccaggttcaagtgattcttctgccgcagcctcccaagtagctgggactacaggcgtacaccaccacgcccagctaatttttgtatttttagtacagacggtttcaccatactggccaggctggtctcgaagtcctgaccattataatgatccacctgccttggcctcccaaagtgctgggattccaggcgtgagccaccatacctggcccaattttgttcaatttttgtagagatggggtctcactgtgttgcccaggctggtgtcgagctcctgggctcaagggttcttcctgccttggcctcctaaattctagggttacaggcatgagccaccacacatagcctgttttttttgtttgtttgtttttgagacggagtctcgctctgtcgcccaggctggagtgcagtggcacattctcagctcactgcaagctctgactctgggttcatgccattctcctgcctcagcctcctgagtagctgggaccacaggcgcctgccaccatgcccagctaattttttgtatttttggtagagacggggtttcaccgtgttagccaggatggtcttgatctcctgacctcgtaatccacccgcctcggcctcccaaagtgctgggattacaggcctgagccactgcacccggacttttttttttttttttttgagatggagtctcgctctgtcgcctggtctggagtgcagtgacacgacctcagctcactacagcttccacctcccggattcaagctattctccagcctcagcctcccgagtagctgggttacaggcgtgcgccaccacgtccggctaatttttgtatttttagtagagacggggtttcgtcatgttggccaggttgatcttgaactcctgacctcaggtgatccgcccgcctcggcctcccaaagtgttgggattacaggcatgagccaccgctcccggcatttttgtttgtttttgggtgttttttttttttttttttgcatttttttggtgatgtgaaaaaatgacatataactcttctgttaatttatttgactatttgtgaggttgaaactttttaatgtgttaattgaaactctggttttaaagagtctctttagtcctctggggaagcatccagggatggaaatggagaggtatttgctggtttcctggctttctcatagttctcatatattgaagacagtgtgctggagctcagtcctaagcactttacttagaccatcatcctacaaccttgtgaggtaggtattgtcccttatttacagatgaggacacagaagctcacatattgaaggtcatatatttataaaatggcagaactgagatttgaattcagaagtatgaattcatcctaaattcaaagacttggttctttggcaagaacatttgtgcaggttttacttccaaacattcactattttttaaaatttaattttttttgtttttgttttttttgttttttagacaaggtctctctctgttacccagactggagtgcagtggcacgattacggttcactgcggccttgacatcccgggctcaagcaatccttccacctcagtctcccaagtagctaggactagacaacaggcacatgccaccatgccgagttgagtttttggggcttttttagagaagagttctatgttgcccagactgtgaacattcactattggaacagaagtaaaaccctcccctccccagcatacagatctccaaccccacaccctgatttcttcaccactcttcccaggacagagaggagaccaagggagagtaggcatcatttctctctgtacagtttttaattttttattttttgatgtttgttgttcagatgaatgacacactcaagttacaaaaatggggccttaaaagaagcacattgtacaatgaacaagcagattggagttaagaacactgaaacactaacccgctaccacgagaagagacggagggggtacaggaagggaaggaaggggctaccaacacaggggtcagacggaactgaaagggaggctaacttggtaaggatggaggaaaggcaggtctactccagggctgatttctggatgccggttcctgggcacccttgccttgtacttgccaccccctccaacttcacccacccccattccaacctggtcattctgggtggtgaaagacacccacaccagaatgggctgcgccaatcaggtctttaccaagtagggtggtcaccttgccctagtgcagccctggatttggaaggtgatggtggaagcagtgggacaagaggccagaaaggagttgaaagttcaggcccctgctcttcccaaagactcctcgcccattccccaccctgccattatccaaaggctctctacgagttgccgagagaggcccccagtcaccctgcaattatataaataaataaatactgagcccctgggtttgggggacatattgggggaggggcagcaaggatagaggacaggaaagagaggaaggggagggaggcagaagggaggggtcacagacatagtaaatagttgtctccatcccagcaacacttctctctggatttttctctccttttgtttgtttaacaaggagctaacaattcaaggacaaatacttaaaaatatacattattttttctttgtttccgcctttgtcatcgtcgtcttgctttggagactgctgaggtcaaagtttaaaccgcatgaaggacttgcggcttggagtttttgtgtatttttttttatttttatttttaattttttttcactttttttccaacatataaaaaggtagcggagttgtctgtgggtttttttttttttttaaatggttaaatctttggtttgtttcttttttctcttggaggcctttatctctcgcacttgcctttcccactcagagaccagtgggggcccgcgtgtctcaatcttgctgtctgtctcactctctctctcactcaggtccccctaccctgggctagaggaagagagaggcaccctggtgttcatgtgggttagaaaaactagtcaggtcaagaggtcaccctgacttggctagtccctcgccagatctccccagggcttggagagcccgtcatggccttctccagggagatggatggaaaactcatatccttcccctcctcctgatctcagccccaactcctactggggcttgggttccccatccctacccacccccacacacacacccaccccaccccccagaagagaacagagagaggtggtttagttactggcatcaatttttttttttttttttttggcacaatgaaaaggcccaccattagggtagacccagtctctgtccctcccttaagtaggaggtcagggttggggagaagagaaattcagagggctccccactgctccaacccactcatctctcctctctttctagcccaggcccttggcccccaacctcggacatctaacctagcccatagcctagcctggggttgccctccccatcccccacataaagctccccagccctccaactctctcgctcatacacagacacacggacacaggctctgtacagaccacaaaataaaaacgatgagatagttttgtttcccggagtcgagacgggggaccagagtgtaaggggcagatgggggtggggggcatgaattcccccatcaccttcccaaccctggctccctccagccccccagccccttgccctggctggcccccagccaacgatatttggtttcctttttttaacattaaagttctatgaggtatttggtgccttatctcgagtcctcaggggaggggggcccagggggagacctggggctcacctgcccctccctccctcctacccccttcccaatatttggtttcacagctgtagttaaagcttgggatttggttatttttccccctcccaggaatttttttttcttgtttttcttttcctaggtgtgagggttggatggggagggtccccagcacccccggctgcacaggggtccctccaccaacatcagggcatctgccccatccctgccccctgctcctcctctcctctttaccccactcccacatactggggtggggagaggtcccaggtggtgggacttgatggggaggaagcaggatgaagtgggtggtggtgagtcctggattttctttccttttttttttttttttttcctttttggtctagaatcatagtttttgtttgagtcatctccaccatgccttccatgctgcctgtcttctcggagggggtttttggttgtaattcctttcattttgctctgctcaaatgtccttcctatttggtcaggagcccttggccccctctccacccttgggctggggcccaagccctcttgccagtcccttctctcttcaggaaataaacatggacaaactcagaggtagggtaagggcagggagtcgttcagcggagatgcttacattccggtgaggttgggtagacgaggtgccaggccccatcgtgccggggtgggaggggcggctacttcaccactgcccggacaaggcacccagaggcccctgcaatggccgagtctctgctgcctccgtcgcccagcccaacagtttcatttcccgggtgggagaagggagacaaggaaaaaagagaacgctgaggcctggagctccatctgcctctcctcagagtgtccggcagaaagtggaagctgcccaggccaaagccctgcggtctcagggctctcctctctctctgctcctgcccaacaaggggcaggggccacactacggctgtcaggccccaccctgatttcaatggctcgtgtccttcactgcaacactttggtttgaggagagacacagaaagaacaagattgagagagaagagaggagagcaaagggagagagaggagacaggaaggaggagaggagagaggaaggaggggaggagagaggaaggaggggaggagagaggtcagacaaaagagaaccgaaaaagaaatcaaaggaggaatcaaaccacccaaaagttgttaagttttccttcatctgttctttttgctttcttactcctttttttcctgtctttttttaaagctttttcagttgatttgggaggggagtttggggctcttcacccctgtccctgataccctctctcagccccgcccacccgcttccatctgccctggccgagggacaggccctgccccagccgccccctccggctttcccaaagacaacgtccatgaggtatttgtgaagagaaagaagcatccgtccttccatccgccttggggaacaagggcctggaccaccggtgcaggggcttggctccgcctcgcggttccatcttattcttgaagagtcctcatcttctttcccttttatatatatatatatatatatgtttatatatatatataaattttttttctagtttaaatttattgtttgtttgtttctgtttttttggttttcggttcaaaactttgttggcctccacaatagcaggagggcagggtggctcccagtggtgtctctcctctgtccgtcgtcagtggagacgtgtccggggctggtcaaacacagggtccagccaagagttgtggaggtcttgtgggagtggtggccaccaccgcgccctctcagatggggaccacaggctgtggcactgtccccaccacatggaccctgatggggatgccatctcgaggaaccccaccactggggtgtgtgcgtgcgtgcatgtggggggagggagaggcattcgccagtaccagaggggcacagggtgggaaaagcgaggtgagttctctttttggtttctggttaatgtcaaagaacgtgaaggatcccacggataggcactggaatatgaatttttttttttttcagggaaacagacaggatggaaaaagacaactgaatgccctcaactgaatgtcttcatcccctcttgcctgaaatttccaccttcccataggctggggagggagtcagttccagagcagaggagggtgacagggttgaggagggacttgtgagagctagaacttggcaaaatggcctagcccacccttcaaaggggaaaagagggaggaacaggggatgaaaagttgtccgcaggccttcccttgaactctcccctgctggggggagggaggaggttaaagcaagaccccctgcccaggtggggagagctgggggccaggggagaaggggacacatggtagggacacattctgttgagcacaatgctaaaaattctgtacatcctttggatgaagctactgaatatttggtgtaaggttgttcaggccctttctctttcaccttctggaaaagaacatttggtgggtggtgctaagccccagcccatctgcccaggctgtgccctgtcttcgctggcccagggctgggggctgggattaggaagctggcatcttctctttttccttctgtagcccccacgggggaggcagggttgggggttggtcccacagccagggctcggtggcatgaggtctgacctgctggaggcttctccgcccctggctggggtttttatttggcgtcgtagcagtgagggtgagcacgctgaggtctggctcgcgactggttttttggtttgtttgattttgtgggttttttttttttttggtttgtttttggtttttttttgtttgtttttcacctctggttcctttggggcagctggtttctgttgtgattatttttggttttctcttttgttggttagtttctttcctttttttttttttttttggttggttgtttttttggtctttcctcccttgtcactcctgctctgaggaccctctgcgtccccaccactggcctcctcgccctcttcccaggcaagggaccaaggcagggaccagaggaatgggaggggaggcatggctggccctcactcaggtttggaccctgcctcgggcccccctggacctccaggggtctgtgctgccgtctcgctgcaagtggaggaggaggaggatgaggatgaagaggatgaggaggagaggccaggagacttgctggagatggaggctgccacagccgcagccgctgctgagaccaggcccacaccaggcggggtgctgagcaggggcagcccagcatgattcaagaagagcggcgaggtcaccaggccagggctccccggggctgcaccggctgcccccagcaccagattcccgctgccatcaaggctggtaaggggcagggttccaccagaggccagggctggcggggagagagagaggctgggctaagggcatgccgggccaggggagacctttgccttccagcatcctgcccagagtgccccccatctccccatcggtcccactgacccccatcagcacccctcacaccttccccaaaggtgagatgggtatgaagaggcaagcaatgcagtgagcaggggcaggatggcatggctggagcagcaatggcagggctcgaggccccagaggatagggctggtgacgatgggtgtgacatgaggcagcacgcaccttggatagtggccaaagggttgttgctcatgagggctggactcagcccggagctcaaccccaccattgtgcttctgcaagaggcaaagcagaggcattagcaggggcagggacctgccaacataactggggtgccgctccccaccctagaagcagcagcgaccctgcttctccccacagcttcccacgtgcacccacttaccccgtgctggggttcaggcctgacaagccgatagccgagtggctgccttgagggctggggtttgtgctgttggtggtggccgggggtgggggagtgacagaggggatggaattgagggggggcgcagccccgcccccgcccccaccccctccagctgtccggctggggtggagcgtccccacagctgaggataaggtagtaactgccagagagagacagaaagatggggtcttcagcttccactcgtcccccactgaggaacctggggtcagctcctacttgtcctcccgcccagctcacgcagcatctcctcagtcagaacagccttagacctccctgccctctcttcccagagtcatttccctgtgcctctgccatggtgacccctgtcataacaatggaagtcagagcaggtgcttcctgctgagccctggcactctacactccctgccctgaaccacttttttaccgactagaaacgggggtgcccaggagacaaagccctatggctccctctaggggctggggaggggcgaagggtgccaggcacactgccacatctgagggatgggcaacctggcaggggctgagggcccagactcagccagactgctggggtagaaactcctggctctgtctcatcccagtggtgcccttgggtgagtgccttaacctctctgaccttcagatcccttgtctggaaaatggggataataatagaccctatctcataaaatgagtttgagaattaagtcagtcaatgcagtttagaaagagtttagtacagtgccaggcaagcacttactactttataaatctccacttactattttctagcctggggaggggcaacgtgttgttttatgtgtatatatattatgtgtatatatattatgcatatatatattatgtgtgtgtgtatatatatatatatatatatattttttttttttttttttttgagatggaatctcactctgtcaccaggctagagtgcagtggtgtgatctcagttcactgcaacctcctcctcccggattcaagtgattctcctgcctcagcctcccgagtagctgggattacagacacacgccaccacgcccagctaatttttgtatttttagtagagacagggcttaccatgttggccaggctggtctcgaactcctgacctcaggtgatccacatgccttggcctcccaaagagcagggattataggcataagccaccacacccagcgaattttatattattattatatatatggtgtataaccatacatataaacctaccgtgtcccaggaagagggaggggaactctggatacaagactatgtatgtatgcatgtatgtgtgtatatgtacatacacatacactcttacatacatgtatttatatctttttatgttttacacattcataataatttaataaaaactgaggcttagaaggataaaataagtgcttgaattcacacagcttaaaaatgacagaggccaggcacaaaactcaagtgcctcaccttttaccaggcccatgcttttctcatatgaaatcgtgaagcagattaaagctgagttgctcctgcagaggaggggtgagtcctaccctcttcccactgtctctcccattcccccacccacactccccaggcccagtcttgaggcccatggacacccagagccacttgggaacctcaggctccagcctgtgccacatcctcccagtcccccctcaccattttctgccctccctgacctgttgtgctcagactgctggaagcttgggacaacggtaaggtccccgcgcccccttggggtgtgacctgaggagagaagaaaggaggtgtggttagccactgtctgccagcagcccccgtgatgctccctgtaggaccccactcctccgtcccaggatgggggcagggggctttggcacaatgctgcatttgtattattccacatgctttcttcacacttgccctagctgatcctgagccacaagcaggaagggctaattctccattgagaacactccccacctctcttctgacaccgccccatctggctagtctttgcagggttgtgtcctgtctgaagtgactgcaccggaagagtggctgctccacatgctcctgatattgttggttctgcaaaactaaaactcttttccctggacaagcaaacaccacccttttaccagtggggttggcaagcaatgcaggagagactgttcaaagtgacccaggcagggaaagagcagatctaaagtgcgaggctaaatggatgcatatctttgcatcggggtgttgagatgtcatattacttgattttctgggaccatcagcttccttcttggccaccccacctccagtctcacctttgcatcagccccagaaacctcactaaatgtgactctctccttccccagctcaaaaccactccttacctcctcactgcccatggttcaagttccagctcttcactgtaaaacttggggtacatgcccccactccttccccaacctcattcatataaactgcagcaccaaccacactaaattgcactggagtttctcaaattgggctgggcacaccctggcttctaggccttagtacacactggtccaggaaggctctttgccttcttgtggctggctaactctcccttgtcctttagaactcagttcagacagtgcctccttcacaccgatgggggcaggggctcctctctggagcatcacagctcttcccagaaatggaaataaaaggatgggataaaggatgtcccagctgtgtctgatatcaagtgggcctgtgtatagctgtggacctgagagtacacccatgggtgtgacaatttccccgaacggcaaataagtgcctctccctgcctctgtgtggttgtgagcctgtgtgttctaacctggaccacgtccctggacatatatcccttcctgtgtggctatggcactgtgataactctgtgtctggctatgtcggtgtgtatctaggggtgcttgtatcccccatgtaagaccacagttccctggaaaccgtccctgtgtaactgtgcccatctacgtgatggcctgtctccaagagtgactcttcttgtctctgttctaggctctgtggacaaccaggtagggtgggcttcacacaggtgcctgcggagctctgtggtctccccaccccccaggcgggctcttggtaccatatgggggctgtagctggccggcttccctgggctgggcagcatgggggccgcactgcaggggttgatgcgtttctccttctggcgccggttgcagaaccagacgcggatcacttccttctccatgtgcagctgctcggcgatcagcaggatctcctctgaggtaggcttctggttctgcaggcagagggctcgttagcccgaggcccaccgcccgccacccctcaggtgagggccacccaggagaggggggcctcaccgctagaaaactcttctctaaggcgaagcggacgtttgtctcgatgctggtcctcttcttgcgtctccggccgggcaggccgtcgaaacccaggctggggctgctcagctggttggggctgggcaggcttgagtccacagacatagtctctgtgcgccgggggagacgtgagcatgagaaggggcctcccgcggccagcggccactgcccgccccctacgcgggaaccccagcctggtcccacctgcatcgttgagccacttctccaggaggggcttgagtttgcacatgttcttgaagctcaggttgagggcctcgaagcgggaaatggtcgtctggctgaagtcgttgccgtagagcttgcccatggccaggcccacatcaccctgggccagtggggcggggaagggcccgaagtcagggtggggccttccggcactgggcccgctccgcccgcccactggccacgcccctcgcggcatctatcaactggccacgcccccacgcccaccgcccagcctgcaaggtgcctccagacctgcgtgaagcccagcttgatgcggcgttgcttgaaggtgcgggcgaattgctccagctcctccagatcactgggctcctcggggtgggatggtggctccaagcatttggggggctgcgggtgcgagaggtgcgggtcgggcagcgtagggcgggtcacggcctggtggggtgggcaggtgggtgggatgcagggcggaggaccaggatggggctcagcgatgggtgcacagtccccctcccgccctcttcgcccctgcgttccatccgccgcctgcagactccccccgccttcctccacaagcaccgtcaatccctttaaaggtccctccacatgcactgttaatccctttaaaggtccgactctgctgccctacatgggtttcctcattgcctgggactctctgcactgtcccttcacgcctgcgaactcccagaaggagcagccagctttttgtgccagggctctttccctggagctggaggcagtggttcatcctcatctcaacctgggaatcagggactggccctgccaccaaatcactgcttagcccaggcctcactttccccctctgcaggatgggaacaatcactgctgttctgtctacccagtggggctgttgagagaatcgggttaaaaatgagtaggtcgtgcagacccatggactgtacaatgccaagagtgaaccctaatgtcagctatgaactttgggtaatagtgatgtgtcaatgtaggttcatcacctgttacgcttgtaccactctggttggggatgtagatgatgcaggaagctgtgcatgtgtaggggcagagatagatgggatatctctatatcttccactcagttttgctgtgaatctaaaacagctcttaagaaattaagtcctaagcaatgagtagattgcaaataaagtaaaagttaagaaaaaaaaaaaaggactgggagggcaattagagagatttacaaaaaagcaacagctctatctgggattcttcattgccctaacaataaaggatatgaagcaggtggtgggtacagggatgtttgtcgctcaggtcctttatccattattctccaaaatgctggggcagatgtttaggaatttttcagttttttttttttttttttttttgagatggagtttcacccttgttgcctaggctggaatgcaatggtgcgatcttggctcaccataacctctgcctcctgggttcaagtgatactcctgcctcagcctcccgagtagctgggattataggcatacgccaccacacccggctaattttgtatttttagtagagatggggtttcttcatgttggtcaggctggtctcgaactcccgacctcaggtgatccacccgctttggcctcccaaagtgctgggattacaggggtgaccactgcgccctgcctttttttttttttttggtataaatttaaggacagccgagtgcaatggctcacacctgtaatcccaatactttaggaagccaaagtgggaggatcgcttgagcacaggaatttgagactagcctgggcaacatggcgaaaccctatctctacaaaaattttaaaaattaaccaagcatgtggggcgtgactgtagtaccagcaactcaggagggctggggactgcttcacttgagcccaggaggctgaggctgcagtaagctgtgatcacaccactgcactccagcctgggtgacagagtaagaccctgtctcaaacaaaaaacaaaatgttaaaagatacaagtgcaattttgttacacaaatgtattgtgtagtgatgaagcgtaggcttttagtgtatccatcacccaaacagtgtacattgtacccattaagtaatttctcatcatccacccactctcacccctctcaggttttgttgttgttgttgttttagagaccagtcttgctatgttgcccaggctggcctcaaactcctgggctcaagtgatcctcttgcctcaggctcacaagtagctgagactataggcatgcaccaccgtgcctgtttcagttttcagaaaacctacataggcagccaggcacagtggctcatgcctgtaatccgagcactttaggaggccgaggcaggtggatcacctgaagtcaggagttcgagaccagcctggccaacatggtgaaaccccatctctattaaaaatacaaaaattagctgggtgtggtggcgcatgcttgtaatcccagctacttgggaggctgaggtaggagaatcgcttgaacctgggaggcagagggtgcagtgaactgatattgagccaatgcactccagcctgggcaacagagcgagactccatctcaaaaaaaaaaaaaaaaacaaaaagaaagaaagcctacataggatgtatatcatagataatgtggcccggcccccacccccactagggtcaagaatattactccttaatcagatacagtaacagttttgcagcagcaaaaatgccataccaagagggacaaagaaaagtcatacactggcttatatcatggcagggcaggttttgcagtcaaatgagttctcatgccaatggtggaagaacaacttgactttctgagcatttgggatttcagaactgcagttaagacctgtattagtctctaactcttcagtcagtccttctgaaatagttcacatatatttttttaaagggctataaaaaatgggtagaaaaaaactttgaaattcataaaaggtagtgaaaattatcattaaagtctagaactcaggcagcaaactgaaagaaaggcctcggggtccaggtgccaaggtggcctggagagctggcaccctctctaaggggcctctgctcctgccagtggccaggccaactgctcactgcgccaagccaccacgtagacacaggtacagccctgccagattttctggtttatcaagaggagctggaaatgtggtgctttctgggaatttagttgacaatgaccaaataaaagacacctgtgggccttgttttcagtctccagtctgggaagtggatgtgaaataatcacctaacgaatgccttgttcagagaatcctccgttgcagtgctggaagaggcccgaggcatttgcagcctaaaggcttgcagccccttgcaattttgtgtgtttttacacatgagcattttgggggaatggggatcagatctaaatctttcatcatattctcaaaggagctcatgtactagaaagggttaagaaccacttgtctgggccagctcccctcattctatagaggaagaggctgacccagacagggagatgggcttgcctgaggtctcacagcaaatcactggcagagtgtggctgggtcaaatggaaaggagactctcactcatcccccacccccgtttacccagctttcagcaggccttgctgctggcctggcctggtgcactcaatggacagtctcacctgtgtgggaagcccggcccggggctgggaggtcagaagagctccctgggtttgctgaggtagctggaatagatttggtgtcggtagcaggcctggaaagacaaggggaaatacacagggtgagggggaggggaaggtgaggaagttctgtggaggcgtcagggaggccatctggggtgggggccttacctggctggctctgctgggcctgcggtagcaggaactgagcaggtggctggaggtggtggcctggcacaagcaccagctgctggagctggaggagctgctgtatgtcctggcagggagtggggtggacagaaagatagcctgagtcctggctgggtttcatcctctctgcatcacctgaaccttgaggggctgaaaccaggaagctgctccacatggcgatctggcactgggcagtgagggatcgtccactcggtctctgaatggcatccctgagctaagggcacccagaggcttctctctaccatggggtaccagagagtcccaactgggcagtcctgggagggctcactctttatttaccctttctttcttttttttttttttttttttttttttttttgagtctcgctctgtcgcccaggctggagtgcagtggtgtgatctcggctcactgaaatctccgcctcctgggttcacgccattctcctacctcagcctcccaagtagctgggactacaggtgcccgccaccactcccagctaattttttgtatttttagtagagacagtttcaccatgatagccaggatggtctcaatctcctgaccttgtgatctgtccgccttggcctcccaaagtgctgggattacaggcgtgagtcaccgaacccggctaccctttctttcttgatgaaatattttccttgttttaacatttccgcagaacaaatagaatcatttaaaaatgtaagccaggccgggtgtggtgactcatgcctgtaatcccagcaatttgggaggctgaggcaggcggacacacctgaggccaggcgtttaacaccagcctggccaacatggcaaaatctcgtctctactaaaaatacaaaattagccaggtgtggtggtacacgcctgtagtcccagctactccggaggctgatgcaggagaattgcttgaacctaggaggcataggttgcagtgagccgagatcacgccccttcactccaacctgggtgacagagcaagactctgtctcaaaaataaataaataaataataaaattgtaaaccagaccaggtctttcctcctttaaaaacactcctggctgggcacggtggctcacacctgtaatcccagcaatttgggaggccgagccaggcggatcacgaggtcaggagatcgagaccatcctggctaacacagtgaaaccctgtctctactaaaaatacaaacaattagccaggcatggtggcacacacttgtagtcccagctactcaggaggctgaggcaggagaatcgcttgaacccggaggcggagattgcaatgagctgagatcatgccactgtgtctctgcactgcagcctgggtgacagagcaagactctgtctcaaaaaacacaacaaaacaaacaaacaaaaaacactcccaaggcaaatgatttcatgtctggaattagctttaaaatactccagcaaatagtgtaaattagtacaaccactccgggaagctctttagcactgttataggttgcagtgtctccccccactccctgccaccccccaaaaaggtaagttggaatcctaacccccagaacctcagagattaaccctatttggagatagggtctttggcagatgatcaagttaaaatgaggtcattagggtgggctctaatcctatatgacttgtgtccttataaaaagggcaaatttggacatagacatggataacgggaagatgatgtgaagagacacagggaaaagacagccacgtgcaagccaaggagagaggcctggaacagatctctccatcacagccctcagaagggacagatccttccctcacaaccctgctgacagcttgatttctgacttccagcctcagaactgtgaggcaatatatttacctcaagtcacccagtttgtggttctttgttttggcagccctagcaaactaatataggcgctatctaagaaaactggctgggcttggtggctcatgcctgtaatcccagcactttgggaggctgaggcgggaggatcacgaggtcaggagtttgagaccagcctggccaacatagtggaaccccgtctctactaaaaacacaaaaaattagctgggcatggtggtgggtgcctgtaatcccagctgcttgggaggctgaggcaggagaatcgcttgaagccgggaggcggaggttgcagtgagttcagattgcgccactgcactccagctcgggcaacagtatgagactccatctcaaaaaaaaaaaaaaaagaaagctgaacatacaccacccttaggacccagcaactccactcctgcatgtaacccaccatacatgtgtatgtgtttaccacaagacatgtactacaatgttcacgtggaccatttgaaataggcaggacttgaagatagcccaagcgcgcacaacagtagaatgggtaaagaaactgtttcagtggaagctacagcaatgagaatgagcagtccacaagtcatggttacatgccacaacgtagacttcccaaacataatcagtgagagagctagtcatgacagagaacatcctgtacgattctaatggttgaagtttggggagtaaagactgaaaagggacaccagggggcttctgggagctggccacattatttctagatctgggtaccagttccatgggtgtgctcacagctgtatacctatgatttgtgcacctttatatatgcattatattttaataaaagtattttttaagacagggccaggcacagtggtatgtgcctgtaatcccagcaccttgggtggttgaggcaggaggactgcttgaggccaggagttcaagaccagcctgggcaacatagtgagacccccatctcaaaaaaaaaaaaatcttgtttgtatagtggtgagtaaaaaataaagtaaaataaagggaaaaaaggggggatgaggtagggaaagagggaggggaaaaaaaatccaatcctccacccaccaaaaaaagtgaggggtttagatgaaatcctatttgccaataggaagggcaaaatgttgatatctattgagcttggtgaagagtatgtggggttcatgacataattctctctacttttacgtttaaacatttctgaaagaaaaagcaaaaccgctttacacacacaatccaatggcttctcatagccctcaacaatgcaaacaaaacccctcacctgcctacaagtccctttatactgaggcctgtgttcatctccctgctcatctcccactgccctatccctccttggctgtgctccagccatttagcccttttctgtttttttttttcaaatgcaccaagcttgttcctgcctcagggcctttatacatgccgttccctctcctgggcagttctacttctgacactaatgcctggatcctaacacaaagtcaccctctcagagatgccctctttgaccacccagtctataccagcccctggcctggcctccccttatcaccccatttcatctccctcacaaggcttaacaccatctccaggcatcgctcctcctgtttactcattcatgacatgcccctctcactggaacgtcagctccatgagagcatgatcttgactgtttcagtcactgctgtatcctcagtgcctagaacagcacctggcacccagtaggtgttccacatagatatgttaatgaaccaagactgatgcttcatcatttacttggcaaattttatgtaaagttgaaagctataacatgttacttacaattttttccttctgggaaattgtgggggttggcacatgcccctcaattcttcccaatgctattattcctaaagaccaatttgatgtgccaggaagtgaacaaactgggaaaatatataagcaattcaacagaaggggctcgtttctttttttttttttttttttttttgagatggagtctcactctgttgcccaggctggagtgcagtggcaccatctcggctcactgcaagctccgcctcccaggttcacgccattctcctgcctcagcctcccaagtagctgggactacaggcgcccgccaccacgcctggctaatttttttgtatttttattagagacgaggtttcaccgtgttagccaggatggtctcgatctcctgacctcgtgatccgcctgcctcggcctcccaaagagctgggattacaggcatgagccaccctgcccaggccagaaggggctcatttctttaatatacaaagagagattttgcaaataactctatataattaaagaagaagaaaaaagtagtgattacaaatccataagtaaaaaactgacaacccagtagtaatgtggctgacagacaggtctggagagtgcccagtgaaattaatgtgaacagctctggatggaaatacactcagattcactcgcaataagataaacacgactgcaattgcactgagatatcatttttacctctcagatcaccaaatataaaaatagtgtgtaataccacattggggagtgtggggaaacacacattcttgtacatgctggtgagagggtgatttggcaatgtctatcaaaattacaactgcacacagccttcaactcagccattctactgctaaaaatttatctattctcactctagaaggctgggaatggccttctagagaggtgcaaaatgacctctctagaaggctattcccagcagcaagtggcattctggcaaaagagtagaaggtagctgagcatgcagcaagacaggatgggttggatgaatgagggcagagctctacagtggaatactatgcagtcaccagcaagaatgaggagtctctttgtgtcctgacatggaacaatctgcaggatgtcctgttgagtggaaagctcaagaggcagaacagagggtatgaggtggtactgtttgtgtcacacacaaaaaaagagtatatctggatatttgcttgggtatgcatagttgatgtctggaaaaccataccagaaggccacgctgtaaatccattcatacctctgggatttgaaacatgtacctggtctgagtaaataaatatcccagtgtctcacccccacccacccaaacagtcactgctgatcaacatccctgcttttcgacagctgaacactattccctgaccccctgggggtgcctctgcttattccgtgtatggcagtggactgggtactcctgtgctcctgacctctctaactcttgctgctaatcatctcagaatccagcttaagggttctgaagtcctagcactctatcctgtgaaacaatgtccaccctgccttccctttcccagctacccccagcccagtaacacctccatggtcacctccctccagatgtggatcaactgtgaagcgggcaacacttatgcttcagggccccccatttacagtgaaccctttcaaggccccatacctaatttttgtttcaaacattgtctttttctttcaaagggactccaagttgcataatcttttggccccacaaaacgagacccacctgccctgtgctacacgtctcccaagtcaatgcatttgcttatgtgtacttttcctctgccagactgactctagcagaccagaggcatatcttattcttcgtatatccctaactcatatcggaacctggtaagcccccattaaatgcccactgaattgaatctaatgaataagactagaaatcaagtcttattaccagcatttttctgatttcctataacccttagcttgttgattaaagtatttgttaactcctgttcctccctagcatgactctcaatgaaaattcccctttcctccagaagcctagagaggtgtctgtgggtttcgttctgaatcaccagcgagaggaaagaatggggaaagtgcatcccagtttgcagaaggtctcatggtgagaagttcagatgggaaacatttaatcacatccctgtctagtttctcagaccagagacttaggggtcagccttaatcccaccttcccttcctctccccatccatccaatccatctgcaatgcaagtcttcccagttccctctacatctcttcctgtccacagtgactgtcctggtccaaaccaccatccttctaccccagaccatccattcgcccccaggcaggcagagaggggtctaaaacaatagaggtctaaatgtttttgtgccctgaattcttcagcatctgaaaaaaaaaaaaacctattgccctcttctcagaattaaaaacacataacatatgatatataggatctttcttttttctttctttctttctttctttctttctttctttctttctttctttctttcttctttctttctttttctttcttttctttctttcccttctctctctctctttctttcttttttgagatgagatggagtctccctctgtcaccctggctggagtacagtggctcagtcttgcttggctcactgcaacctctgcctcccgggttcaagcaattatcctgcctcagacttccaagtagctgaggctacaggtgcacccaccatgcccatgcccagctaatttttgtatttttagtagagaaggggtttcaccatgttggctaggctggtctcaaactcccgacctcagatgatccacccacctcgtcctctcaaagtgctggggtcacaggtgtgagccaccatgtccagccagatatatagaatttcaaatgaaatcaatcacataattatagtcatcatcactagggactccaaagggagggagaagggcaaaggctgaaaaacttcctactgggtactgtgttcactactgggtgacaggaacaattataccccaaacctcagcatccatgcaatataacccttgtaacatacctacacatgtatccctgaatctaaaataaaaactggctgggcacagtggctcatgcctataatcccagcactttgggaggctagatgtgagaatcttttgagcccaggagtttgagaccagcctgggcaagatggcaagaccctgtctctacaaaaagaaaaaaacaagaaggaggaagaggagaaggaggaagaggaggaggaggaggaagaggaggaggaggagaaggaggaggaggaggagcaggaggagaaggagaaggagaaggaggagaaggaaaattagccaggcatggtggtgcatgcctgtggtcccagctactcaggatgctgaggtgggaggatcccttgaacccaggagtttgaggtggcagtaagctatgatcacaccatggcactgcagcctaggcaacaaagggagacacccgtctccaaaaaacaaaataaaataaaataaattaattaaaatttggctgggtgcggtggctcatgcctgtaatcccagcattttggaaggccaaggcgggcgaatcacttgagttcaggagtttgagaccagcctggccaacatggtggaaccccatctctaccaaaaaaatacagaaaaaaaattagccaggtgtggtggcgggcgcctgtagttgcagctacatgggaggctgaggaaggagaatcacttgaacccaggaggcagaggttgcagtgagctgagatcacaccactgcactccagctcgagcaacagagtgagactccgtctcaaaaaaaattaattaattaaaatttaaaaaaatataggcatcaaacatattttgagtggtcataaaatcatttatgggtttctttattagcacactaagtaacaagatccagcaatagatctgatgactactgtaatttcaaagcaatcatgagtgaaaacagtgttttgagagatctgcaacaactataagagaatttgaaaatctgcgtacattctcttggtgacaaagtctcagtaccgctaatactactgttgtctgttgtctatattcatgatagagggacatgctatggtttggtcagaagatagtaaaaattgagatgtaatttttttcccatccaagttcatggactctgaattctatgcacagactcttctaggggtggtctatggagtccaagtccctgttttaaaatataaattaagccataaggcctctactgattttcatcacatttgtggtataatccagatccaggctatggtcctgcatggcctgcccaccacccccgcttacctctccttccttgcctcacacaactctaactccctaactctgatccagccccactgatctccttcctgttactgaaccacaaagaagtccccacctcatacctttgctataccctttctagatctacacagaggtggtccctcctcatcatttaagtctccatcaaacgccccctccctagagaggccttctctggccacacactcttatgaagtcttctttttcctccaacactctctattacactcttttctttccttcatagcaattatctgcttcctgcctatctccccaactacagcgggtgtcagctccaagagggcacagacttatctacctcattccccgctatatcctcacccagaaaggcacttgggcatggtgatattcactaaatatttgccaactaaaggaatgaaagaaggggagaaagatgatggggcatggtggctcgcacctatagttccagcactttgggaggctgagacaggtggattgcttgagcccaggagttccagaccagcctgggcaacatgacggggtctctacaaaaaatccaggcatggtggcacgtgcctgtagtcccagctactcgggagactgaggtgggaggatggcctgaccctgggaggtcaaggctgcagtgagccatggtcacgccactgcactccagcttgggtgacacagagagaccctgtctcaaaataaaacaaagaaaaaaaaagaaagaaaggagagaagacaagattctgggtgaacaggaacagtaagttggctcaggactagggtaagccggtaggaggcgccatttctccacaatccagcggcagcatggccctctgaagccacttgagggcgtgttacgtccgagtcagagcacaccagtcagagggtggagaaggtatagtaagtggagacaggccagagaaaagaccctggctggcatattttgtagatcagctgctctgtccctaagctttaaggaaacctagcacaagagctagcatgcctgtgaaagctgagaagggacggtaccgattcttgctcattgctgtattttgatcaccctcccagtgcaggagcctcataggtgatcaatacattttcaatgaatgaatgaggtgaaacctcaggacagactggcagtactttgccatagctgggactttggctatgactgggggcagaaaggttgatatgtggattgcaggatacatgggtgaattgcccactttcctaccagggctcagttccacctgggggagaagagaaagccatgacagtgaacttgaggagttcactgaggaggagccccagagccggccggctgcaacggcccaggtgctgcacctcactccagtgcacaggccagacggcccatcccccatggcctctcgcgcccccattagaggcctccacacaatctctggcagccaccatgactggaatggtgttggcgcatgagttgacattcctttgccatccctgatatggcaaattgtgaccagctctggatcttccctctctaagacaagttaagtccagagtaggggagaacaggaaggagtggggtctgggaactatgtaaactatatcgtgatagattgtgttcaaaatgaggaagggaggatggatggggaaagggaaggcggacaacggacacagtttcagtgagataacaggaatacattctggtgttctattgcacggtgactactgctaataatgtactgcatatttcaaaatatcaaagacagagttttagttttagtttttgttttttaagagacagggtcttgctctgttacccaagctggagtgcagtgcgtgattatagctcactgcagccttgaactcctgggctcaggccatcctcccgcttcagactcccaagtagctgggattacactgcgccactgtgtctggcaagaagagtactttaaatgttttcaccacgaagaaatgataaatatttgaggtgataagtatgctaattagcctgatttgatcattccacaatgtatacctgtatcaaaacatcatattttactccataaatatatacaatgattatttgctacttaaaaataaaataaaactcagctggatgcagtgactcacgcttataatccctgcactttgggaggctgaggtgggaggatcacttgaggccagaagttcaagaccagttgggcaacatagtgaaaccccatctccacaatttttttttttttttttacttatccagatatgatggtacatgcctgtagtctcagctacttgggaggctgaggtgggaggattgcttcagccaggaggttgaggttgcagtgagttatgatggcgccactgcacctcactgcagtgagttatgatggtgatagagcaagacctcgtctctaaaaaaatgaataactacataaataaaataaaacttaaaattaaaatgaggtcaggctttctgacactctgagtaatctcagtctgtctggtggtgggacgcactgcctgggaagggagtgggtgcctgccatggaagccacctgggtgaaaatccccacctggcaacaacaccaacaaggaaacgcctaacctaggggaaggttagactagtggggtgcaagggtcccttccagcttggaaactcgggggtttgagccttagccctctcacctgcttcttgctgtgtgcctgggggaagccactttccctctgggccccagcctccttaactgtacaggatcacgatgcaagttgttatggagagacctgggccttggagcccagaatcctgactgcccctcacacacctcaggccgttccttaccctctttaagcctcagtttcctcaggtgacaccacaataagtcttacttcatggagctgttaaaggaattaaatgagacaatatgtgtagaatgtttagcctgattcctcttcacttaattggtccttcataaatggcagtcattatgactgagtcatttctctcccagggcctcagttttcttatctgtaaaatggggataataatgtctactttttcactgggttgttctgaggcctgagtaatattatctagaaagcattttggaaattacaacatatccctcaaaatgagcatttgctaccattgcccacctcatgtcaccacacttgaatgtgagctcttgagggtgggaacccaatctggctgagtccttccttccttccatctgtccatctatccttctttccttttctttctttctctctttctttggagacagggtcttactctatcttctgggctggagtgtcatggtgcaatcatagctcactgccatcttgacctcccatgctcaagcgatcctcctgcctcagcctctcaagtagcttgggggctatgggcatgcatcaccacacctggttaattttttttttttaagatacagggtctctctatgttgcccaggctagtctcgaactcgcctcaagccgtcctcctgctttggcctcctaaagtgttgggattataggcataagccactgtgcctggccaaattcattctcttcctgacaactaacaacttccagctcctgcccagatactctgctgagcttcagcctcaaatatgcatctgcttagttgatgttcccatgtggatgattaatagactcatcaaaccctaacatgtccaaaatgaaactgctggctctctaccccagccttccaaaacatcccattcctcccatcttccccaactcaggaaaccacgtcattaccacccagctgctgaagccaaaatcctaggagtcatccttgacctatccaatcaatacaaaatagcaaccaggatccccatcctcaccctcctggctcaagccaccctcatgtcccatctgtatgccttcaaggacttcctactgggctctcttttctactcttatcccctgcagtccattctcctatcccctgcagtcgattagtacagtcactccactagggcaagctctaaagatgggagtaggggcagaggagtggccgttctccagtgtgggttcttctctggacccccagtggttggccctgtgacatggaacccaggaagttgtggcgatcagggcagaataccacaaatggagaatgattcaacagggagaaaaaaatacctacatatggactgcatattacatcacatgctaccttatgctaaaattccaggacagacaggcaacagcagatcccaacccaggaaccagtgggagcaactggcatgcctgggccaggctcctggactccaaggccctgtggatgaactgaccacacacctccaggtgggcagttttgattggcctggtacccactgccccttcttcaacttattcaagcaacagaacccatctctttcaggggttacactttcccatcctcaagtcacgaggtccaggtagggctgaccttgccttctctggggtcgagggcaagggctcaaatctagccaggggacgtgtttttgtttgtttattttattgagacagagtctcactctgttgcccaggctggagtgcagtggcacgatcttggctcactgcagcctccacctcctgggttcaagcaattctcttgcctcagccacccgagtagctaggattacaggcgcatgccaccacggccggctaatttttgtacttttagtagagacggggttttaccatgttggccagactggtcttgaactcctgacctcaagcgatccgcccacctcggcctcccagagtgctggaattacaggcctgagccaccctgcccggcccaggggacgtattttatctccctgggcaggatagctacaagtctggaaatgctgacacccattttacctgccctacaatgaaacagggagacagacccctggagctgggcctgatattccagaccaggccttttcagtgatctgagccaaatattcctgagtcttcttcagccacctggacttgggctttggctcctccctcccagctcatccatccctatttgtgcggctacagcctgccctgttttctcactttgcacttgccattcccacagcctggaagccccttcccagcaaactccttcccattcccctgagttcagatcccacctcctcctgaaagcctggacagatgtgggtcctgattccctcagacacacatcacatttctcttcccacattcccatcacactcagttggtttctttgggaaactttcactcgctaggtcgtagcagcctaaaagattttgtcaagctttatttgccatggtcctattaggaaaataggaaattttcccccctactctccaatataaaatgatgttttaactgttaacgtaagttttcaatcaatgcctgcccctaccccagacattctgaaatacttccctggagagatatctctcctatccttgattgaaaatctgccgcaaaacatccctcattgattcggtaaatatccacacagccccctcggcagaaggcagcacactgagcaatggacagacaaattatagaactgtattataattgccccttcgtctgtacaagctaggagattgcagggaaggatcctgccaaactgtttaaccagcatttactttggaagctgacatcagagggctggaaggggggcttttccttggtactttatataatttcaaagggatagcatttatgagtgttttttactctctttcctgggcttcttagtatctttcaagtgaaacatttcttagtggctcactgatgtgcttgctccactgcaggacggggagcccctcaggggcaaggatggctgtgactcactcctaagtcttcagcttcctgccatggcctgacacacaggaggccaggaaatgtttgtggaatgactgcaggatcagagcttagcaggcatgagaagtggactggggggtggaggtcatgagatgcggcccgggagagacatccgagcctaggagccggggaaggctggagcagtgggtaggtaagtcaggaagagctggtccctctgcagcctgggcccagcacagtgcccataggaggtgctgttgtagaaatgacgtcaaagggcaactcagtttgtgagagagaattcccagaaaacaaacttggcccagctttgcacttgttgaagacagaaagggaaagatcagagctgagggaagctggggaaggaggagtgagaggaaaggaggaggggtttaaggagcccttgacaatcagggcctgggctatacggcaggtggtggaggctcagcttgctgctgctgggtccctggggagctgggggaggtggctctaggagtgcataggcaagaatgtctgctgctcacagagatggtggcctggctgggtctgcgctaggctgccctgttctgccttctatcctctagtctttgttccttcaactgatatttcctcgagcagattcaggcacggctggggggagggaagtcatcatgacttcctagaggtgtggactcctgggctggggctcagatgaagaggaactgtccaggtaaaggaagggagcagacttcccgggaaaagagagaacaagagcagggccactgagatgcaaaagagctcagccccagtgaagagccccaagcccttggcgttgctcagtaaagggctgtctatgctacaaggcaaatggaacacctgctgctggagtctctggtggccggggtgggaggggctagaaaccatgttccgtgaaggacagctaaaagcagcagccgcggatcatgtggttagagccctggacttccaggccggctctaacactcatgcttacagaataatctggggcaggtcactttaccccttggagcctcagctgtggggaggattcatgggagcaaagaggccatcactggcatggtgcctggaagaaaggtggcacccaacagactagttactgttacttcaagagccaggtattgaaaggctacatctgggctgagcaccgtggctcatgcctataatcccgcactttgagaagccaaggtgggcagatcgcttgagctcaggagttcaagaccagcctgggcaacatggcaaaaacctgtctctacaaaaaatatgtatatataaaaaaattagctgggtgtggtggcatgcacttgtagtcccaactactcaggaggctgaggtgggaggattacttgagcccaaagaggtcgaggctgcagtgagccataatccgccactgcactccagcctgggcagcaaagcaagacctcatctcaaaaaaaaaaggctacatctacaagagccatcacggagccatgcgcccagtttacagagtgtctccacagaaccaggcccagtggaaggaagttctaaggaggcaggttatcagctcagtgttaaggaaagtcccaaatgggagcattggccaataatggaacgggccattattggggtgaactgtaacaagggaacagccttaccagggctggacagctccctgcatggacagcatctatatctagggttctgtggaagtggttggacggagtgagagaaaagccttttgtggagcagtcactgagggaaacgccaggctaagggaagttaaacaggtggctttgctgtagggcttcccacgaccttcactgccctgaaacttggccacagctctaaggcttatgaaaaccagacagacaacatgaatgggtgaaaaccagacagacaacatgaatgggtgacatgggaaggggtggacaggagtgggctggagacagctgcccttcggaagaggaagcctactcagctcccactctgctcccccggctgtccttatgggaactctgttggccactgttaggggttaaattgtgtccccaaaaagatatgtggaagccctcactcctggtacctgtaaatgtgaccttatttggaaatagggttgcagatgtaatcaagttaaaatgaggtcaatggggtgggccctaaactaatgactagtgtccctacaagaaagaaaaatttgaatacagagacaggtgcacagagagaagatggccatgtgacgacagaggaggcagagattggagtgagccatctactaagctatggaacaccaaggattgacagcaccatcggaagccagaagaggcaatgacagattctccctgggaggcttcagagagagcacggccctgccgataccttgagtttggacttgtggttggagacaatatgtttctgttgccttaagccacccagtttatggtattatgttacggcagccctaggaaactgagacagccactaattcatgattaactatggaccagcaaaagctccagagtcagggaggtgatggagaacctcctaattcatagatcacgggccccttttttgaaagagcatcttgttggataagccaggggacacgatgagggtagggcactcattcttattcttaaccttttgttttgtacccacatggtaccattcacgagagtgactcctggtttccttacctgtatgttgaggacaacaatctcaacctcccaggaggctgtgaactcccagcgagatgcacaggaagcactgcccccaacacaccaccagagggaggattatgatgtgggatattcctccctgtgagcctcactttacccctctgtaagatgggacagcaacatcttccaaagcttcctagggttgctaggaactgcctggcatgtggctggtggtcagaacagtccatgtggaccagtcagccccttcccacacactcactgtttctgcatgtccttcactgcagggagcctggtccccagtggctgcccttacctgtgctgtgagctggatgggttgggacaaggtgagctgtggggtcccagggggctggctggcaggctgtggtggtggcaggtcaccccccccagaggaggctgggggctgtgaggtcgaggaggaggcagaggaggaggaggaggaggaagtagaggaggaggcggaggcggcggcggcggcggcagcggcgttagcggcagcggcggcactggactgctgcacggcggcggccaggagctgggcctgggcttgctgcaggaggagctgctgctgagctggcatcagtgccgtgagctgcggggtgtcggggacagcaggaattggagcaaggggttgaagaggagcagagaaggcagagaggggttagtgcctaagccaagcaagtaaggggacaagacctcctagaggacagaagagggcaagaggcaggtgtgagagagtggccatggccttggtggaacagttcatccactagccctgtaacagatgaggggtggctggtttgtcccctcgtccccatccttccccaagtacttaccccagctagctggctgcccgtcaacatgagttgggcctggggcagatgaggctgggccggctgagggggcaggggtgctgctggggctgaatcgccactggggtcttcagccttgatctgggggggagagaggcagggtccgggaccccagaatgttaagtggaggccagagagaatgcccacctgtgaaccaaagagagggcacgtgtgtggcaatggcaatcaggctggcacaggaggagcagactggggtgtggacatgagggtgcagtctgtggtcctgcactgaccgctgggagcttcaaaccactcctctggcctcagtttcctcatcaatcagatagggctaacacaacacctgcacccaaactccctacagaagtcgcctttgcagagcacttttcccctcctgagagtcagttttcctgtctgtaaaatggaaaagagtggctgggcacggtggctcatacctgtaaccctagcactttgggaggtcgaggcaggcggatcacttggggtcaggagtttgaaaccagcctggccaacatggtgaaaccccatttctgaaaaaaaaaaaggaaaatactcccactgggcacctgggaggtcaaataagtggcttctgggtcccacacccttcatctgtatcacacagaggtacatctctcttgctttttttttctttttgtttttgagacaaggtctcactctgttgcccaagctgaagtgcagtggcatgatcacagcttactgcagcttctacctcccaggctcaagcaatcctcccacctcagctttccaagcagctgagactacaggtgcccaccacacacctggctaatttttaaatttttctgtagagacagggtatcactatgttgcccaggctggtcttgaactcctaggctcaagcgatcctcctgccttggcctcccaaaatgctggaattagaggcataagccactgcacctagccaggtacatcccttatttgtccaatgaagtaagactttgttggaagaaaaggttttcaggtactaagaaaaaccaccaccttggaacctgggctacaaagtcagatgcttacagaaatgggcacaaatgaatgacaggagtaggggtggatggaggtgggctggagagagcgcctgcctaagtggaaatcttatctggctcctactcagctcctgctggccactcttttcaaaatctagaacaaaaatactggcataataagcaaagcacagcatttgtcctgcactgtggacaagccagatgtggcccaggaaataccaggcttcagcctccgctcctgaggtctgccaagcctctccatgtctttctgaatatgatatggacacaccttgcaccatacacacagaacagaccagcatagagccaccctggcctcctccattcctaggtaaaaagccagacaacagcagttgttggctgaaaggcctgttggctgaagcacacacagtggtgggagaaggcatggcctgatggatcacacaccctcaggcctaaagtggacagtgagtttatccttcagcctgatagcccaacaccattttgtaaaaggaagtccagagacagaaagcaacttgggcaaaatgacacagtgtgttggcaggggggtgatatttggaatgtggacagagacaaacagaggccaaggaaaggccaaataatagacagtgaatggcatgtcccaaattatggaatataagtattagaaagtttaagagctacagaggccaagtgtggtggttcatgcctgtaatcgcagcattttgggaggctgaggcaggaggattgcttgaggccaggagtttgagactagcctgggcaacagagcaagacaccgtctcttaaaaaaaaaagagagagagagaggttaaaaaaaaaaaagtgctgcagagatgcagcatgaaatgacactgagtatgagaagtcagggtagcagctatccctggcaggggcattaagggcctctggaaggctggtcgtgctctgcttcttgatctggtgctagtgacatgggtgtgctaagtttctgaaagttcacagagtcatacattgaagatctatgtgtgtttttaatgtgtatcatattttaatacaaagtttttttaaaaataggctgagcgcggtggctcgccccttaatcccagcactttgggagccaaggtgggaggatcacttgaggtctggagttcgagaccagcctggccaacatggtgaaaccccatctctactaaaaatacaaaaattagccaggcatggtggcacacacctgtaatcccagctaattgggaggctaaggcaagagaatcacctgaagccgggaggtggaggtgcagtgagccaagatggtgccatcgcactccagcctgggcgacagagcgagactccgcctcaaaaatcgcttgaacccaggaggtggaggttgcaatgagccgagatcatgccattgcactccagcccgggtgacagtgcgagactccgtctcaaaaaaaaaaagttttaaaaaaataatgttgaatgccatggtgagcacactattcccttttcagtgcttttttcattgtttctggttatcttaaagtctctgattggtgcttgaatgtctttaccatctctccaatactagctaatctccacttttattttaattttttttttgagacagggtcttgctctgtcacccaagctggagtgcagtggcaccatcaggactcactgcagcctcaacttcccagactcaagcgatcctcctgcctctgtctcaagtagctgagactacaggcatgcacacccagctaatttttgtattttctgtagagacagggtctcactatgttgcccaggctggtcttgaactcccgggctcaagcgatctacccaccttggcctcccaaagtgttagaactacaggcttgagccactgcatctggcctaatctccttttttttttttttttgagctggagtctttctctgttgcccaggctggagtgcagtggtgcaatctcggctcactgcaacctctacctcctgggcacaagcaattctccacaatgcctcagcctcccaagtagctgggattacaggcactcaccaccatgcccggctaatttttgtatttttagtagagtcgaagtttcaccgtgttggccaggctggtctcaagctcctgacctcaggtgatctgcccgctttgtctcccaaactgttgggaatacaggcatgagccaccgcgcccagccctaatctccttttttaataagcctctttttaataagcctcttttttaacaggcctctgaggtttagacccttcggcacacaagagactctgggtaaattttaataatcatcatatttatttccatggcaagtgattctggttttccatttgtgaaatttccatttaaaaaacatttatttaaaaagctgtcgaaaagcaagccagttcatgagttggtaattgttgaagctgattgatgggtatctaggggctttattttcattataaccttctctctatttctgtatccacttcacattttccataataaggtgcttttttaaaaaattgagccaattaacaaaattattatgtaaatagttgcgcacagtggtcttatgcctgagactgtgacagaagcacatgaatcacttcagttagggaaagactgacacagaagagatggagagaagttgagaggcaaagcccagagaaacagggcgtacagggcgagttgtggacagagcccgaggccaggaaggggagggagaaaccttcattcccttggtcccactggcatccccaaaagaaggaagcctgctgccagtttgagaacagactgcaaagatctgattcaactgaggacagggtgggggcaatggatacacgctgtgctctgagggctaaggcaatagccaaacctgccatcagagggtcaaggaggtcaagatcgagagcctgtctcccctagaccccgttcaaagcgctcagcacagaagcaggacatctgctcacaaagcacttttatcctctcctctcatggtagcatgggggtacaccagacatggaggcaaccacagaggccatcccatccgactgccccctcccccctgaccaatgatactgaagaggaaactgagaggcccagagaggggaagtgactttcccatggtcacagagcaaagctgtagcagggtggggagcagttcccagcctcccaccccatccctcagccaccactggtcagggtctggagtcctgctcacaccttctctgcccccacctccagtgctaccttcaagcctctggacctgcctgctacccctggaccaggctggagggtggagactggagcccaggcaaccccaagaagcccagaatgccaggcacagggccccatctggatgtggaatttgcactgcctggctgcttccggcctccctgtcattctctcctgcattcctacagctatcctcaactggtaccagcccccccacccccacctcagctggccgctaaatgtgtatattgggggacaggcggtggtgcaggcctctgttgggtcagggaagttgggatgggggcgggcctttggcttcctgttgttcatcgccctggggctctgggggggatttccctagccacccccaccccctagggaaggggaaggagcctgcgtgagtcacaggcctggggtgggagcccaagagtgagaaggggcgggaggaacctcgttaccaaggtaccaaggctcagtgctctctcagcccttggactgaggcaggcctcctgaggaccctcttccaagcgctgcccacttccctggctgttctgacaggtgcttacctttgtactggggccagttggggacacggagaatggggaggtcttattttgggggttctgcaaagagaaagtaggagcaaggggatgggaatagtgcagtgaagcagcttctgaccacccccgctccctgccctcctaccataggcggcacagagccccctctgaacccctctccccattccttcccaccccctcccgcttatccactccctcctaacctgatgattagtgtctggtccatttctttcggtgtctgcaaagagagggaaaggatgtgttgtcatcagccacccccaccacacctgtcccctcccagctctcttcccatctgtcccacttcccctgcccacggtgacccctgcccccctgctccctgcccacccacctgtgtgctctgatggggagtccagaccttgcttctcggcctccaggggcttagacattcttatttctggggacagaggaggaatggaagtggggtgaaggaggggaatccaggagggctctcgggcccccattccaccacactccccaagcctttcccccaaattccccccttacccccagccaccttggaagtgtctcttcccaagagacatgtcctccgttctgggcctctgccctcctctggcaagatgagacacagcacttaggccttgggggatcttgccttatcctttcacctctccagaaagtaacacaggggtgttacccacagtgcagcaaagggcagggcaggagatggaaggtggtcgtgagaaggtatcagctgcccaggaggaggctggtgacgtcccaaaggagggagagcagccttgggcctcctcctggggcgggccgcccaggctcccgtcctgccctaccaggtttcgggtgagacatgttttccactctgagtggggcctcagagatgtgatggggctgcagcgtccccaaaggaggcagttgtcagatctcagcatgtgtgattcagccgccctctggccctcttcccaccccaccactttccccatccacatcttactcccacctggactttcttcctatgtttagcacaccggcctagcagacccaacctcatcctctgtaacctcagctccatctggctctacccctgagcttgtcctccaatctaaacctgatctgggacttcacgcttgagccccagctgcagtctcaagtccacccctgtaatacaaccccattctatagctccctaggcccaggaaatgaaaggaggtggccaagggagggtggcaggcagcaagcacataaacccacggagacaaatgcctgtcctcaaagcgctctgatacttttcacagaaaggcgagtgctcaccagtgccaagcatagagctagatatgactcacagctcacattagcggttagtgctaatattaccccgttttacagaggaggaaactgaggctccacgaagggatgtcacctccccaaaagcacagcaagacagcagatgtgccctgattggacccctggtcttcatgactgctgggctcctacttctaatcggatccactctagtctaatgtcccctagtcctgacttccagccatctcatctccaacagttccctcgcccaagctcatcctgaaactgaatccaacccttcctggtcctagaccccaggacaaatctgggcttcagcctgacccatccttagtccacttactcaccttgaatcccaagttgtgcccagatggctcaagtccttcatctgaccttgactcccaactgtcctgagatcctgtccctgatccaaactcttcccacaactcactccaaaatccctgcctaaaccatgaccccactcctactaaaggagctgtccaactctagtgttctctgcaccaagatacttaaagaagacagctaagccaggcacagtggttcacgcctgcaatcccagcactttgggagactgaggcagccagatctcttgaacccaggagttcaagaccagcctaggcaacatggagaaaccccatctctactaaagacacaaaaattagctgggcatgatggcacgcacctgtagtcccagctattggggaggctgaggcaggagaatcgcttgaatccaggaggtcaaggctacagtgagctgtgactgcaccactgcgctccagcctgggtgacagagtgagaccctgtctcaaaaaaaaaaaaaaagaaaaaaaaaaagaatggagctaaagtaagggataagaaataggaagaactcagtaactgtaaaaaaaaaaaaaagtctagaaatcttgcaattgagtattattcaatgtgaaatgctgcttgagttttaaattcctaattaaaaaaacaggtcatgcattgctggtgggagtgtaaattgatacaagcaccactcagaaaagctgaaaagatgccctctccctaagatgcagcacgtccactcctgggcatctgcccaaaagaaacacgtgtcctgcccatcaaaggacatgggcagaattcttctgcagtctttcataatggccccaaactggaaacagcctaaggggccgtcaacaggtgaatggataaataaaatgtggtatgtccatacaatgaaatatgccacagtaatgaaaaagaacaaactcctgcttcatacacatggccgaagcttggagacatgaggctgaatgaaagatgccaaacacaaaggcagacataatttatgattccaattacaggaaattcaaaaacgggcaagctgatagcagatgatcacagtcagatgagtgagcaccttgggggtactgactgggaaagggcatgaggaagcctgcaccaggtaagaaaggatcttgtttggtggttacagggtccttacataagcaaaaattcatcaagctatacacttaaaatttgagcactttactctatatacgttatgttttaacaagcaagaaaacatttaaaagctaaaaagcaaaacgccagcacacagtcccattaagatgcacactgcaccaaggcaggtagatcacttgaggctaggagtttgagaccagcctgggcaacatagtgaaatccccgtctctccaaaaaataaaaaagttaaccggacatgatggtggtgggcacctacagtcccagctactcagtaggctgagatgggaaggtcgctcgagcccaggagattgaggctacagtgagccgtgattgtaccactgcactccagcttggataatagagcaagactctgtctcaaaaaaaaaaaaaaagatgtagactgttgagggtgggggtggggagtgggtgcccaggacgctaccagagttcaggtcctgtttcctggccctggggacagggcattaaatggctactgatacaagatataagaaggacaagaagggagctgggcagcaagtgtgtcctgactttggagcagtaaaggcgggaatcctgcctgatcctagctctagttcacccagaccttagccctacttcaggcagccactaactctaacccggtcctaaatcccacccctcctagcatccctaaaactgcagccccagcctcctctggcctccgtccctccagcggagctccacattgcctcagggcaatcctttcctggctcctccctatctcctggagaaataaacaacctggcctccaggggctggcccaccaccctgtactgctcttctcttgcagctcatgcacagtgctcttcacccatgtcgagcatctccccctgcttgggggtctgcttgacagcaggctgtgcaggttctacactcccacctagctgggcatccctctcccgtccacagaacagggcagcctcggaccccactgccagcccagaaagtccacactcatccttaacctctgctatgggctaagttgcatctaccaaaattcatacacggaagtcctaattcctgatacctcaaaatgtaattgtatttggagatagggtctttaaagacgtaattaaggtaaaataaggtcattagggtggaccttactacaatctgactggcatccttataagaagagggggcgggcgcggtggctcatgcctgtaatcccagcactttgggaggccgaggtgggcagatcaccagttcaggagtttgaggccagcctaaccaacaatgtgaaatcctacccctactaaaaatacaaaaattagccgggcatggtagtgtgtgcctgtaatcccagctactcaggaggctgaggtaggagaatcacctgaacccaggaggcagaggttgcaggcagccgagatcgtgccactgcactacagcctgagtgacagagcaagactccatctcaaaaaaaaaaaaaaagaagaaaaagagggaattaggtcacagatgggaacagagggaagaccatatgaagacccaggagaagaccagtggaccacaagccaaggagagaggccttggaagagaccaaccctgctgacatcctcgtctttaacttacagcctccgtaattgtgaaaatgaatttctcttatttcagccacctagtctgtggtactttgatgtggaagccctagcaaactaagcctctcacagcccctgccctcctgctgtcccatccctgagcccccagttgtggctgtctgtgtccaggttccttccccacaagaccaatgcgacaggcctggtctgactcatcactgggtccccagcatcacaagcccagaacgggttgtaactgctgaatgtccctctctttagcagtctctgtttcctactacttctcacccttgtcttactgtctccctgctatttattttatttaatttatattttgagacaagagtcttgctctgtcggccaggctggaatgcagtggcacaatcacggctcactgcagcctcgacctcctggggtcaagctatcctcccatcccagcctcctgagtagctgggactacaggtgtgcaccaccacatccagggactacagctgtgcaccaccacatccagctaattaaaaaaaaaattttttttttttgtagagacgggtctccttatgttgtccaggctggtctcagactcgtgggctcaaatgatcctcatgccttggcctcccaaagttctgggattacagccatgagccaccatgcctgcactttgccatttaaaacatttcctgaggccttggcatgggctgttccctctgtctggaacactgttccccaatctgtccacctggcgacccccggactcatccttcagaacccagcataagctctgttttcttttctttttttttgagatggagtcttgctgtgttgtccaggctggagtgcagtggtgggatctcggctcactgcaagctccagaggtctcctgggttgaagcaattccctgcctcaggctcccaaatagctgggattacatgtgcgcgccactacgactggctaatttttgtatatttagtagagaaggggtttcactgtgttagccaggatggtctcaatctcctgacctcatgatctgcccacctcagcctcccaaaatgctgggattacaggcgtgagccaccacgcccggccataagctctgttttctatgaaaccaccaccttgatgcccccagctcccagccaggtctctctccagctccccataccctagcaccttcccttgtcactgtcttagaggctgactgtagctagccgggccccactatgtctcccctatcagactaggaatttttcaagggcagatctgatctcaggttcctaaacactccccagcagaagacatgtggatcagtggccccaaggtcctgatctccctcccccaggcctttgcctctgctcgtctcccacttgggtgaccctttccttctctactggcaaactcttgctcctctttaaggtccagctcaaatgtcacctcctctgtgaagtactctctgattccccagatggtcagtgtctctctcttctgggcttcactgaccctgtactgtgctccaccacatcctgatcatcctgggcagagacctccaccccaactgtgggctcctcaggagcccaggctggagtcattgctgcacaggcctaggagtacgtctttggaatgaatgaatgcattaaagaatcccctaactgaccagggcccaatcctgtctaaaacaaacccctatctctactgtcacccaacatccccaagaaaccctaacttaaatctttaaggtatgatttcctctgcagagactgtggctggaaagacaagagtggtttgagggaaatttttcaccattctgttacccttattctccctaaattatcccaaccactcctacatatccctgcatactccctgccccacacttggctgggtcacaacaaaatggccaactgctgccctttgtcttttctctttccacctcccctgtcagagctcaatctgagagaagggtcagatcatttccaccaggaatgaacagggagctccatttccaccgtggactaaaagccaaatgacgccttaacagggactccagggcactagcaatcatagacttggagggtccatcaaatggctcggcctcagcctcagcctgagcccaggcagagatgcccatcgcctatcactcaactctagaaaaatattgatgcctgttcccaccctagactctgatttcagtggtacagggtgtgacttgggcatccagatatttaaaagcccctccaggtgattctctttttttttttttagacagagtctcactctgtcgcccaggctggagtgcaatggtatgatctcagctcactgcaacctttgcctcctgggttcaagcgattctcctgcctcagcctcccgagtagctgcaattacaggcatgcatcaccatgcccggctaatttttgtatttttattagagacggggtttcaccatgttgggcaggctggtctcgaactcctgacctcaagtgatccgcccacctcagcattccaaagtgctgggattacaggcatgagccaccgcacccagccccctcctggtgattctaatgtgctccatcccctggcaccttcagaagcccctctcaaagcctcattcacacacaaaagattggttggttatgtatggctattcccacccctcatcataggtaatgtgtaatattttaggggaactgaaagagaaaaagcaatgcatagccctaccaggccccttggagccatgttgccccttgaatcccaccttcctcaggtcagacacccctcaaccagggctgcccagccctgagctcacactcacttgcccgactgccccaggcctgggactcttggtcctctccaccctcccactcctccctccccggactttcacttctcctctgcatttccccccgccagttttagcagacttaggccagcttctcgttagcacttaccgaaaacggggctaaatatagagggcccaaggactgcccctcacccctcctggccccacttgtcctgtcccctgggtcccctgcctccgcagcctgcttcaattaggggtatggcctgggagcccctgtgggcaggttggtgctgccgggaacctctgtgggcccagctggccgagcccccgtcctccccagaagcagcacctcacccctccccaccccacagctgtccctgggtggcctcaagggagtgaacatttctgagttgtcaggagggagggatggagatacaggcagcagacacaacaagagaggtggccccacagctgcgctgacagcaggcaagagctgccaacagtacacaccccatggccacagccaggcaaggccccggccaacacaatacaagaaacagatgtgcacagattccagacaggaatgtgaacaggtttgcagatacgacacatgcccagacatgatgccacgggcatatatgcaaaacacacacccaaacgtgcgtacacacatgcactcacacacactctcacactgagtgacacacagccagccagacacacgtaaaaagtatacaaactcacacacccggagtcgaacacagacatacaccctccccctacatactacacccagtcactcacagactcagacatgtgtacgcacacatgtacttacacatgttctcacaccaagtcacatcagtccagccagagatacacacccagacatgcacatgctcacacagagtcacacacacaaacacaagtgcacacacatacacccagagtcaccttatcctggaagatggccagggctgacctctgaacccagttcacaggtgtggagtctgagaccaggcagggtgagtgatctgcccacagccacacagtgtattaattcatgtccaggcagggaaaattcaccccagtcttcccacactgggctgttctgtgagaaatcccaagtaaagggtttagcctactgcccagcacctctgaggtccccatttaaccccagagaggaacgagtcagtgggagcagacaccctggatctctgtgtctacactgtatggacacacacacatatacacagttgcatacacagtcacctcaacaaataaacatgtcaccctgcaaatagtcttcctttcatcccacccctctcctcaccgcctttgcttgctcatacccactcattcttcatatccctgctcagacacccccttcctccaggaagccctccttgacactctaccaactaaatcacatgttttcagggctcctacgatcccctaatacctccccgtcctggcccaacccctctacctatgtccccctatcccagccctgacccctctgcctgggcctcccccatcccagccccaacccctctacctatgtccccccatcccagccctgacccctctgcctgagcctccccaaccccagccctgacccctctgcttggggcctccctcatcccagccccaacccctctacctttgtccccccatcccaccccgacacctctgcctgtgcccaccaccccagccctgacccttctgcctgggcctcccccatcccagccctgacccctctgcctgggcctcccccatcccagccctgatccctctgcctggacctcccccatcccagccctgacctgtctgtactgtcattggtgacaggtctgtcttctccaataaactgggagctccaggaggacagacctgagctaccctttccactgtacttccaacacccaacacagaactactcaatagatacatgttggtggaggacacacgggtgcccgcacacaatggcgcatataggacagcacacaccaccaaaccaagactcatgcccatggtcatgcctacacagccacaaatgaaacaggcatgaagggctgagtgcttgccatgttccaggcactgtgctaagcatgctacatgtattacctcatttaagactcccatcaacactgctgagtgatagccatcaccatacagacatatacacattctactaaatgagccaacagctataaatcaccttgtacagtgcctggtgcacaatgttcactcagccaactgacatttggtggagaaggcatttaataagcacacaaacaaacacataatgaaattcccagcagtgatacgtgccgtgaagaaaagataaagcagggtgaggggactgagagtgacaggatcagtgccagtttagatggggaggtcagggaaggctgccctgaggaggtgacatctgaggtgaatgaagtgaagaagggagccaggcaatcatcaccccacaatgccacacacaacagccccctacactcacaagcacacagcagtcccactcagagcactcagaactactgcacacacacatgcacacgcacacctgtaccagatgtgcacacacacactcaaaagggaatgacatcccccaagtccagcaacttggcattccaatccctttgcagcccttatccaaggattgcccatgtcacccaccccactggttctccacatgagggcccgctaccaacacccagctccctccctcccgtccccagacccttcggaacagggcaacagagaagagaagatgttggaagttccggtgcctgatgtggaaagagagggcaaagaggagctgtgggggttagcggggacccggcatgggagagagggagttgctagagtacagaggagaaggacaatggagacagctgaggaggaggggcaggcagggcccgcagagcaaacctaaatgtgctgcctgtcctctgagcagtggcacaggcaccagcccccttacctggagcccccatgctggagtgaaccatgctgcccgccccgccagggctgggggaacaactgtgtcatctccccaccctctctgggggccgagccctccctgccggaagtcactcagggaggaaaccacagggccggtccgcccccttcagaagggaaaataccctggcccacagacccgccccggcagcccggcccaccccaaatcatgtgtgtgtgctggggggtgggggctagtggggcagaggataagcaggctggaagagccgactcctacggctgcgatccaagaggtgcctgcaacagttgccccccgacttctgtcgcccccatggaggcaaacaagtctggaacagggaatgggggtctgggagagaaggtgggtccacagcagtaacaacaataaaacactagccagcagcttattggagagagggctttgccgatgcctgaccctgtgcctcactcttgacaggtgccatctccaatgtggtggtcactcttatttgccccattttacagatgaaaagactgaggatcagagaggtgagcagtagctttcccaaaggcccagagccaagaagcgttgaagcttaaaagcacgccgcggcagggaagatcaagcaagccctgcgcctatctgcaggtgagctgttgggtgccaccattgggaggaagtggtgcccgtgggcagtggtagtggggacggtgggtcggggacttggcctggggctacaataagtcgccggccaaatgcgggcgcccgaggcggctccagtggaggggagcaccaggtccccgggctgccggctggctcttcgcgctgcggcgctcccatttcagcgcttccctccgtgcccgccagagggcggcagcgcccagccaatgggccggagggcggggccggctgcggagaagggagcccctccctccgctcccctccccaacaccctcccaacacctccgctcgcacacctgcgagggtcacacaaaggcgcaggactcccggcgcaccgcagctcagacaaaggcgcgcccgagtccgctgccctcttcctcttggtgcccgaggtctgaggctgtggggctgcctggcgtctccagacaccccacatgcccgcctgggccccgcaggacatcctgcgccccgtggctggggggccccctaaaccacaggtgcatgcacagacgcctggactcaccctcacacacacaagtatttctacagatgaaccccagcacttcacacacacacacgtgtgcacacacacgtgcatgaacacatctatgtgcacaggccccaacaccagccctccctgctgacgatggtcactcccatatactgatacctcctctactccctcacatggacccatgggcacaagggcacttctacacatatgtgcccaagcatacttcctggccactcgcacccactcacacacaggcacactcagaaagggtatactacaggcacaactacaggagtgccctcccctgactgcacacgtgccctgtgcacccagacacacccaggcaagcaggtgggcacaacaggaaggactggcagttctcatatatgcacacgagaggtgaccgtttcccggcatctacactccacaacatcccgtatcgtaaaggccatttcacagaggagatccacagaccacacagcaactggccacaggatttctatacatgagggtcttcccgacagcagcctggtagcagtggacactggagccttgtctcaaagcgacatttacgcagtaagctttgttttcagttaggatttgttttggggggcttggaaatggggctataggacattatgggggggggcaaaacctcaccagccacccttatgctccaccctggacagactcaacatcatccacgtcaggaacacgcttttggatgtgaccccattccagccccctagagccagcagagaaggaccacccacttccagtgcggccaggtctgcagttcagtcctggagccggggaaggctgtatacgctccctgagagatgaaacaaccccacacctctcgcctcccatgctggctccattctcagtgcctcagaccagagctgggcctggtgaggggatcttgaaggaggatgggcctgcctgagagaggatagaggggcagagtttggaacacactggcagctggaacagggaggctcaaggcagggggagatggtggcctcgttgccacagaagaggcctcgagccatgctgagggaggcaggtagggcatgggagctagggagcagtgggggccacttgaggtgcagggagctgggagggaggcggtacaggggaggccaggctgggctcagggctgagcggtaattaaaggagacgtagggggctccccagggccagcggggctggtaactgacacgcgggccccattgctccgctcatatttctcgccggatcgatacgtttgactcccgacaagacaataatcgcttgtacgcggccggcgagtcgatcaaatacattattagagcgaggtcccccgggggcccggcggggagtggtgggggggagcagccagcccaccggggacagcagagcgagattcttcacccctcagggccccccagccatggcctcttcctcttggccacccctggggaccctctctgtggctcagttccccagcctctctctgaatgtctgctgctttggtgatctctctactcagcccccagcatcatccttgctctgtgagggaacccaagggttctttccccataggcactgccctcatctgtagggctgtggcatgtgggagctcagagaggctcctcagacccctagcttggcaggagacagggagaccaagcctcaggccatactctgagtccatggctgggccaggagatgaacttgggcccaagactcaatgatacccacctccctctgcccagtccccttgctgcatctaagcacacggggcttcagcagcgcccaggccaggggcagcctctggggggttagggaaagctaacctagggacccaaacaagcaggaaaacaggatgataggggtggcaggaaaacaggatgataggggtggcagacaaacacatacacaaagagatgtgtgtctgctcctgctgcagggccatgtggtcccccagtgggcctcagagaccctcaaaccatgcccagcctcagctctggcccacccgagacactgcttgccactcttgcccactttcctggcttctaggctcaagcctatttccccttttaaaaaaaattaaattaagctttagctttatttttaaagtccaggctctttttttttttttttcctttgagacagagtctcactctgtcgctcaggctggagtgcaatggcacaatcccggctcactgcaacctccgcctcctgggttcaagcgcatctcacgcctcctcagcctcccgagtagccgggattacaggtgcacaccaccaggccaggctaatttttgtgtttttaggagagacagggtttcaccacattggccaaactggtctcgaactcctgagatcatgtgatccacacacctcagcctcccaaagtgctgggattacagacatgacctcaagcctatttcctgtttacacacctgctttgccctctagacccgaagtgcccctttgcttctccagcagccctaagtcaaagtcaagttctgcttaggagtatccagcattcagggacttaaaatatatcttcctctttgtcttcattagcagcagcagcccccacagcattgtggtctatgctttccttttttttttttttttttgagactgtctggctctgtcactcaggctggagtgcagtggcatgatcttggctcactgcaaactctgcctcccaggctcatgccatcctcccacctcagcctcccagatagctgggaccacaggcgtgcaccaccacatccagctagttttgtatttttagtagagacatgggttttgccatgttgcccaggctggtctcagaactcctaggctcaaagccatccacccgcctcagcctcccaaagtgctgagattacagtcgtgagccactgtgcctggactactctgtgctatttgaaccaatatattatttctaagtcctcatgacagtctgaggaggtaaaggtctgctatcatcctcattttactaacaaattgagcctcagaaaggtgaagtctcctgccccaagtcacacagcatgagtggtggagtcaggatttaagcccaggtctgtccccctgacagcttgatctctctgtactgagccatggagctccttcttggaggcgtgaaatgctccccatccttcaggagacaacagcaacagccagccactccttgtccagtcagcaatgctggaatacctctgcagctcacagtccaacgcccacagccttcgagtcagtttcttgatattcggcaatgcactggactcctgatcccatcagctcctggctgaaggtgggccaacccttccccatttccttcaattcaaacatttcctcatgtccctcagtgccaagccctgtgctgggagctgaggacccagaggtgagctagatctaaaatctgacctcaaggagctaacagtctgagaggaagactggagtggataaaaataccttggtaatttatcacttaataaatatccaataaatgctattatgtgccaagccattgctaagctcagagaatacagtggttaaaagcaacccatagagcttatagtctttgggggagaaataatttttaaaagttatcaactagcagggcatggtggcatacccctgtagtcctggctcctctggagggtaaagcaggaggatcacttgagcccaggagttcaaggctgcaatgagctatgatggcaccactgctctccagcctgagtgacagagcaagactcaatctctaaaataaataaataaataaataaaataaaaaataaaaagccatcaaataaatatgtaattctaagttaggaaaagtgatttcaagaataggtagaggaggggctgggcatggtggctcacacctgtaatcctggcgctttgagaggctgaggtgggagagttgcttgacaccaggagtttgagacctgtctggacaacatatcgagaccccatctctacaaaaaaaattgttttaacttagctgggtgtggtggtgtgcgtctgtagtcccagctactcgagaggctgaggcgggaagattgcttgaggtcgaggctgcagtgagctacgatcatgccactgcactccagcctgggtgacagagagagaccctgactcttaaaaaaagtagaaggaggatacctgatgtaaacaaaggatggcatgttgcagaaaactgtcccaaggaagtgacatttacatagcaattagacacagtattctcgaggcaaagaatgtgaaggaagacactccaggcaatgggaacagaggaggcgatggccccatggaaacaaacagtgtggcaattccaggatcagaaaggaggcctatagagctggagcagagtgaacaaagaagagaagataggagacgaggtgtgaggtggagaggcggccagggccagatcgcacagggccttgcaggccaaggtaagaatttgggacttcaagaacagtgggacacctgagaaggtttcaagcaggggagtggcatggttctatgaacacttttgtgacaatcctggctgctttggaggccgcagtgaagaaccagaggatggagtgtgggggtcagcgtgaggaagctgatgaattccacatcaccatcaggtgatgatgacaggaagcaataattggtgattggctgaatgtggggcatgggagtcacggagaagtcaagaatgaggtccaggtatgttaaagtatctttcctggcacagaagattggggcaggtggaagagcttaagctcaggtaagaaagatcagggtaggacctgaggtcctgaaggatgaaaggaagggcaggaggtgggaaacagcattcaagggggttgccaaggttgaagaccccaaggtggagacaaacttggctttcccaagtttgtcctcaagttcctttgaggttggatttgaagttgcaggtggaaggcttctgcgcagaagcattctgtgtaaggaagttctactggggacaaatgtggggaccggctggtagcatggaatctggagacaggatgaccaatggggaggctgggacagtggtccaaggcggcaggggagaaaggagccatgaggattaggatgaggatacatattcaagctggagtctacaggaacaggatatgagaagtgggtgctgggctggggtggctgggtggatgcgaggccatcactgaaagacacagtgagaagggaagcagggggaagacacttgggtcagttccagggggaaagtcaggaagcagcatcttccaagaagcaaggtctgtggaccagaagtcagcagatgcttaacaaattcacatggatacaaacattcctcatcatatctccccaccacagccaattttccacatccaccagaattcccagttcgcctcatgtaagaaaagaagcactgtgatgtggctcaaagaagataaaagaagactaactggccgggtgtggtggctcacacctgtaatcccagcactttgcaaggtcgacgagggcggatcacctgaggtcaggagttcaagaccagcctggccaacatacaataaaaccccatctctactgaaaaatacaaaaattagctgggcatggtggcgcacgcctgtagtcccagctacttgagaaactgaggcaggaaaatcgcttgaacccaggaggcggaggttgcagtgagctgagatcacaccactctacttcagcctgggtgacagagcgagactgtctctgaaaaacaaaccaacaaataaaagaagaccaaccagtccctgttctgaaattcgccctctagtgacctagggccagccccctgaactccctggacctcagtttccccagatatatgtctgagatgggctggagaagcactctaagacttcttccagcttgaacattcttttattttattttactttatttggctcactgcaacctccacctcctgggttcaagtgattctcttgcctcagtctcctgagtagctggggctacaaccatgcgccaccatgcccagctaatttttgtatttttagtagaaatagggtttcaccatgttggccaggctgatctcaaactcctgccctcaagtgatccacccacctcagcctcccaaagtgctggaattacaggcatgagccactgtggcccggccccagctctaacattctgtagcttgaaagaaacaagaacgggtgagatggactgacggctcaactggccattgacaaatagggaggtaaagcatggccaacctactctaaagaggccctggctgggtatactcggcaacccacttactcctcactgtcatcttatgagggagagaccattatcatcctcactttaaagatgaggaagctgaggcccacagtcacacaatgaggctggagtgaacccagaggcttgttgaccccaaagcttgtgcttcagctgttttgttgagctcactgctcctcaacctggcttgtgtgagtctcattcagactgcagatcccccaggaacagggtcccttggcatccactgccatgtgctcaccagggtctctgaatgacctgtgggagcaggcgcctggccctgggtcttcctcaatgaggctctgcccttggcccaggagtccctagcccccttgctgctgcccccaggctttccacagcccacatgcgcacttcctgttctctagctcccactgggcgcagcaccaactctgcaggctcagaggccgccgctgtcatcccagcgcagggagctgtccaaaggctgaaaagcaagagcccatggccttggtccagagccctccagtcctgctgcccccaggacaaacccagtccccttactgtggcctccagggccctacaggacctccccgctggccacaggagtaccacacctcagccacactggaggaagctaattttgtccccaacatggggccttcaaccttgccagcccccttgaatgctgttccccacctcctccccttcctctcatccttcaagactccactcaaaggccactcctcagagaaaccctccctagtcatgctccactccattcccagttttatttccttcagagcactctgaaattcaattgccgcctatttgctttactgtctctttcaccctctaaaatgtaagctttctgaagacaggtgtccttttctgtcttgttcactgtggtattcttggtgctttaacagtgcctggcatatagttgatgcttgaaccttacttgttgaatgaataaatccttccaggcacccatggtccacagaataaaatccaaggctggctctccaaacccaagtggatatggtgcctctcaacctcctcagctatctcaccctcagagctcacctttctcctctgttcaataacttgggctcccctatgtgtcccatccctcatgcctgctttgtctgccacaaattctgtacacaccagcctctgctcaaatatcctctctctggaagccttccctgacctcagtcttgccacagctccaggtagtatccccgggctttagcactaattgtactgcactgaatcacttcccaatgaggctgtacctacagactgtgagctccttgagaagagggctcagtttgacatgttcttgtagactcagcacccagcactgggcctgcatttagctgaggctccaggaatgtttgttgggtaaggacaactgccctgcagatggttaaccatctatacaggtgaacataatgactagtttggtagtcaatcagatgagggtttggaatctggttcctccattcatttgctgtgtgaccctgggcaggtgacttctctctctaagcctcaagctcctcatctgtgaaatgggggcagtaaaattggctgacaggaacttaattaatctttttttttttttttttttttttttgagaaggagtcttgctctcgttgcccaggctggagtgcaatggcacaatcttggctcactacaacctctgcctcctgtgttcaagcgattctcctgcctcagcctcccgagtagctgggattacaggcatgcaccaccacacctggctaattttgtattttagtagagacggggtttctccatgttggtcaggctggtctcgaactcccaacctcaagtgatccacctgccttggcctcccaaagtgctgggattacaggcaagagccaccacgcctggccaggaacttaattaatcttaaatttaatatttgctaccatgccctaagaacaaacatgttcactaactacatcaagatttgaggttgagaaaaataagaaacagtctagatgccaccgataggacagtggctaagtaaattataatacattcatactcaggaatactatgcagttatgaaagagaatgagactgatctatggattgcggacatgaaaagttctccaagacactgttaagtgaaaaagcaagttgcagaacaatttatacaacttgatatcattgatgtaaaacacatacatctatttttaaaaactgtatcttttctatgggcgtacaagtattaagcaaatgcagaaaaaatggtctggaaggtaactaattataacctcttttgtagtaacttcagttttggtttgtttgtttgttttgagatagagtctcactctgtcacccaggctggagtgcagtggtgtgatcttggctcactgcaacctctgcctcccgggttcaagggattctcctgcctcagcctcccgagtagctgggattacaggcacgtgccaccacaccaggctaattttttgtattttcagtagagatggggtttcaccgtgttagccaagatagtcttaatctcctgaccttgtgatcctcctgcctgggcctcccaaagtgctgggattacaggcatgagccactgtgcccggccagcactttagttttaataatgagattgtacttgttttttggtgggggtttggggtttggggggttttttatttgtttttgtttttgtttttgagacagggtcgtctcactctgtcaaccaggctggagtacagtggtgcaatctcagctcactgcaactgccaccccccagcaagcaatcctcctacctcagcctcctgagtagctgggaccaaaggcacatgctaccacacccagctaagttttgtactttttggtagagacaggatttcaacatgttgcatgggctggtcttgaactcccgggctcaagcgatcctccctcctcagtctccctacatgctggggttatagtcatgagccactgtgcctggcctgtactcatttttttaattaaaattagaacatattaaatgatacacatgcagaaaatcaaataaatgattatcccaaaagtgagaattgtagttacctccagcagagaggaaggagtatgtttggaaagggacacacggggtggggcttctgggtgcctttgacatctccacccaagtggtgaatgcacagatgttcactcgatcaagattcattaaactggccaggggtggtggttcacacctgtaatctcagcactttgggagactgaggctgggtcacttgaggccaggagtttgagaccagcctggccaacatggtgaaatcctgtctctgctaaaaatacaaaaaattagctgggtgtggtagtgcatgcttgtaatcccagctactcaggaggctaaggcttgaacctgggggctgaggttgcagtgagccgagatcaagctgctgcactccaccctgggcaaaagagcaagactctgcctcaaaaaaaaagaaaaaattcattaaactgtacattaacgtcttgtccaatgactgtgtgcttcctgtgggcaggggccaatcattgcaatatcatctgtttccccatccccatttcactgcccagaaacagacttaatataagttgtgtgctcagtagggagtgcccatcacggcaagcgctcaggagggccaaggccgctgtccagggtactaacgacccaagcctgggaggccacagagaaggccagcaaagcgagccagcttcaagatgcctcattctgaagggcccctgcccacctcaactcctctctccccacccccttcactcacttcctccaagctgtctgcctttctgttcctgcaatccacgcccgcgcttcttcttgcctcaggacttttgctcttgcccttcctcctgcccagtgcagtccttccccaggtgttcctaaggctcgtccccttacttactccagaattacacttaaacaccccctccacagagaggccttttgacatcctgtctcacatggcacttctcatcactacgtcctctaccaggttgcactttcttctagcactttttgctgtctcaccttcaagcctcgtgtcacgtgcttgtttattacctcttttcccccaaactgaatgtttatgccagcacagggagcatgtgtgtcccattatgtctcatcctgtcttttagaaggatcccaggtgcacaaaattggattaatcataatccttggttcacagcgtactcccatcactgggctggatggagccctctttctctatccattcacttattgttttacttatttttaataatgagttaatgtgaacccacattcaccattcagattagaaccatgataataatcatactagcctgtgtctgtcctcttcactgctgtgtctccagcacctgcaacccaggaggtgcttggtattgatttattgaagaagctgacaaaggggcaatgacctccacaccctgcaaaagggagctaatgggagtgcccacctggcctcacaaggcgggagaagaaggcaaaggccaggccctccactcagttcccctgtcctcccctggtgctccactcctgctcagcctgggcaagcgcctcttccacacgattcagttccacatcttcagggagggcccactgtgccagaccttgtgccaggagctagggacacagggtggctcagcttggccatgctcctgaggagctctcaagcctcgatgctccaggcccctagaccatcccactattctactaagtaacaagagcagctacatggcacctgctctgtgcaggcatatgttatgtgtattctttgcatcatcttttggcatcttcccaacaattcactaaagcaggggctgttattatccacccccttttcagaggagcaccccaaggcgggtcagagagggcaaggacttgcccagactcagtcatgggcaagccaattccagagcccagctctccttgccccaggccttgctgttacactgatcccatgcacatttctcttcctccaaagtctgtgaagtcctgggcctcttgcatctctgcaaaagcaactgaggatggctgaaaaggtgtcaactttagagtcacataaataggtagttaagtcccagctgtggggctaggtgtggcctatgtgtcacttggcccatgtgtcacattcctgaggggatgaaattaaaacaaaatgtgtattttttactttatagttgaatgacactgccagaccacaccaccagtaagatagtatgcattttgttttaataaatcctgaaatgaccttataaatatcagttaacgtggcattttattgttgtcattgctaaaagcacaggtctgtaaatccatttcagtattccttcgttcttagtacactaggaggctcaagaattagaagctgccttggcctctctcagcctctgcaaagactgctgagtcctagctgtgcaactttgagcaaaccactcagcctctctgtgcctctctcagaactgtgcggaccctgagcagcatccacagagggccctgcctacagaaggtgctctacattgattcagaggagtttaacttaacggaactgtattagcccagatcgcatgagacacagtgcctgtcatcgttgaagcaaactctgagctctggacatttgaaggaaagtgagggatcaaggaagaagtctaggttgttgttgtgacaaccatttactgagatggacacaagctcttggaaaagcttgggagagggaatcaagagttctgctttaggctgggtgcagtggctcatgcctgtaatcccagcactctgggaggccaaggcaggtggattgcttgaggtcaggagttcgagaccagcctgaccaacacagtgaaatccgtctctactaaaaataccaaaattagctgggcatggtggcacacacctgtaatcccagctactcgggaggctgaggcagaagaatcacttaaacccgggaggcggaggttgcagtgagctgagattgcgccactgcactccagcctgggtgacaaagcgagactctgtctcaaaaaaaaaagagttctgcttcccaggaggtggagcttgcaatgagccgagatcgcgccactgcactccagcctgggtgacagagcgagactccgtctcaaaaaaaaaaaaaaaaaaaagaaaaaaaagagttctgctttagacaagttaaagagaagccctccacctactattaatatttagaagcattttctcactgaatcttctcaatactctacaaaaaagcattgttaacatccccattttacagaggaaaacactgatgcccagcaaagttaaatcacttggctggagacacagatggaaccaggattggcacccaggaaaccggactccaaagtccacattgccatccactgttctcttcctctccctcaaacccttgcccaccctgtcccattggctcagcagaaacactggccttggacctgggctttgctgtctgagacatccatgtatctcccatccccgtccccagttatggccttctgccaatatgaaccattcactgagtgccttcacatcacctgcccaccttgattcacaacaattctgggatgcagattgcacaatgctccccagctccactttgtggggccctagcagattctccgagctcatacagaaagaccagctgtgaggggagccaacaccttcaaatctactcgctccctacaccaccttactcagagctcacctcctctgtggagtctcctaagggaaggcccccccattcacatctgtgcaagatcccggtctggcaagaaacttctcagtgccaaccaggcactttagggttcacatggagaacattaaatataagcaacccaggcatctgcctcatggaggcttcctgcagcctcctagggaaaaagtagcacctgacctggtaagaggaaaagctcaggtttggaagggtcagactctcactctctgctctccacttctttgagccttgatattgtcaccaattccaaaagcgctgtctgattcctccactcctcccactgcagtccaggccaccaccacctctggcctgagtgacttcagtggtctcctccccgaaggtgtcccttcttccatgcctgtctcagatagtctcgtctccccttggcccccaaagggggtctttctaaaacgtaaccaggtggtgtcactcccttgcttaagattctccaggagcttcccatgcatttgggaataaaactcaatcaccttaacccaacctataaagtcctatgtcatctcacccctgctgacacctctcatctcttcccccatcactcacctctttgcctaccctgctccaagccatgctgtctcctctctgttctttaaaccatgctctttgcaaccccaggcccttcgcatgtgccattccctctgcctggaacactgttcctgtgctctttgccccattaaatcctactcgtcttttaaggtttggcttaaataacttgccctctctcctggctccctattctagtttattctttgggatagacttatcagttcctgattttgtatttgattgatgtttacacttaaagatctgcatcttctctagttgtcaactccatgaaaatacaccatgctggttctgctgcctgctacatctttagtgcccaacaaacgctgggcacatagtgggtgctcaacagacaggtggaatgaatgacttaaatggatcctgcatagggacaagcacctgaggcagagtacttaagtcttcgaagcctcagtttccacttctgtaaaatcaagataataattcctcctttacaagatagtggtgaggatccaaatagtcaatgaatattgacagtgcgttgggaaaaaatcctctgcaaatacaaaagcttaaagacctggaacctagaggatgggcaggagtcagagagaagagcaacaggaaagggcatggccatttatcaggtgacattgtgttttgtatttcccctttccctgacccctatgaggtagtagttatgacccagaggaggaaataaggctcagacaggagaagcccccttcccagggtgtcatggtgagtccatggaagagccgggatttgtacccctcacactgaggcaggcaaaatggtcattgcaggagaagcatcccctgatctcttgcccccctcttcatccttcgcccccaaagccctcacctctttccaggtttcctggtcttggcctgaatctcatactcctcagctgatcctgccaacctcatctccaccccaagacccacccagccctgccccagctgacacctggttcttgtgctcacatcctggcctttcccacatggcccagagggacctttctgtcttctattaggaaggccttgtactaattggaaaacttttgtttgacggtaatgccaaaaaattcataactagtgaaaagtaagcactgtttcaggcataagcaagcatatagcatgtgggtaaatacgtgggtctgtacacgcctttgaaacacaaatgccgtcttcccacatcagagggatctctctaacacagagatcctcactcccctccgcaaaccaggtagctgtgaggccagaggtggggaactgtgaaagctgcactaatgtagaccttgttggtgttgggtggaggtgactggtcctaggtgaaggagagaggcttggaaaggacacccagggtcatcctgagatcctcctcatcctccaaatgcccccatctgtcaacttcccctcaattcaacccaaagatgtctgaatccctctgctcctccggctgtgcctcccactcaggacttgctcctccccaccccaccccaccccagcctctactgttgcacgggttcttcctcacttgctccacaaatgtcccttgaatcctgtctgtgtggcaagcaatgaaccagacaccagtgatgtcacggcccctgctctggggagctgacaatggacatggacccaggcgtcttgaatccacgccccatgttccttaaagcatgaccctggttgggcctcgctcccacccagaccgagaggaaaaatcttggcaccctagacctgcccacgtctgcagcttcaccttcccaagccaccatgagaaggagagaggaggggcgaccatgttccccagcctgaagatcctgccctcaactccctccctaggagacagaggaccctgggctttcaaggcaacataatccacaggggaggccgtaaacacccttggagtagctcgcttttcaggggaaaccaaggctcagggccagcatgacttgagcaaagccacacagcgcgtctgtggcagacagatgggccccacccctcagttcccagctccatctctgcgagtgtagacttgtttgaacttccctagacactgacactgccaagagaaagaagaggggcttaagaccctttttctgcgtgttctgctgatgttccaaggacctgagcctccacttctttctatggctgtgggaggggagatgaaccaagagagatggggctagacaagggatgtggggcgcaggcagggtagaaaaagacagagtgaaaagcatacagcagggcagagaaaagaggggtgtaaggaaagagtaactggggactatcaaggtagaacagagaagtgtatgggggtttttaaatccctggagggagaggcagcaataaaggaaagagagtcagagtcaaatagagagacagagacaggaagatgcagataaagaggtagagagagagaacagcagaaagagagacaaagaaaacaggagagaaaagaaagagggagggagggggaagagcaagcagaggtggggccacaagggcctcctgtaaattgcttcccaacaccctctcccctgcccctcacaccagcagtccagcagggtgtgtggtgtcgtccccatccctgaaggggctgctccgggcagagctgagactgacacatgggaaggtgtccagctcccggccctctctcttttcctgcacccagctgcctcccaaagaaaagggccaagttcagtgtggaaggggcagagacaggccctgggggactgagagctgaagtgctgtaaccaggggcagagaggctgcagtctgtctcccctcttcagtgcctggtccccacagacaccctacctgttcttgtcccctgctggctgctgagggacaggctttggctatcctgactttggccaatgcctccctcaacctgtggccatcgtctccctgcctggtgaccccaacaccctcctgtacctcctcctacccatccctgtgccccccaagaccacccatcccatggccacctttctgctcctctgcaggtttggggttagggaagggagcacagaggcctagatggggggtggaaggcttggtggattattgaagatgtgcgggcactgcggctgacatggatgaggaggaagaggagggggtcttggtgatggacgatgctgatcctgcggtggggggaatggcaggggagggggtggagagggctgggggaggggtggtgaggaagcaggttcggaggggagcaggaccaggctcacatttggcattcagggcagctgacaataaaaatgctttattgccaagaaactggatcgatcggggctggagggggccggcaggggggacgcggagggctcagcgcagaggccggcggccggccttcgcagcgaccagggcccgagccgccctcccccctgcacccccctccctgcctcctgccctttctctctcctgcagccaccgcttagttcttattatattttttcttatatatttttcccccagcttctcctgctcctgtttttttattcttttaattttttttaaaactcgctgcactcccaatgccgcaggccgggtgggggtggggtgggggcatctgcctgggccaggcccctatccacagggtgcccagaactgctggctctgggatgagccccactttgcttctgtatcccccaatccaaccaggctcctcctagagcctgtcctctgtggatgcccatctccccctgccacccctccaaggggcctccttccaacctcagagtacccacacacacatatccatggtgggctgagggccctggccaggccttcctcccctcccccctacctggccccctgctcactcccggagccatttggctgatggtcagaactgtctgtcaaggtggctctgagcccctggggacccagatgggaggagggagggggagaggtcgggggtcaggccacgtcccctcagcttgtctctttcccctcccccttcctaacaaagggagcatcggcctgacactggcgggatggcctggtactcagggaagcggggaggagaggggctgtggggatggccatgggcagaaggcgggggtgggggccgcctgcccctcctctgccctccccctcgggtcaaggctaaggtgattcctcaacctctcggaggctgggctgggaggagaggaggatctggacagacaaagaactggagccctggggagttgggggctggggggacgcacctgggaccagggcagtcctggctgagggaggggcaacaggcacccctctggccctgctctcaccctctggatggccctgcctcccatctgtaccaatccctacggatcccagagccatacagaccttccagcttgggcaaggtcggatgggggtggggggaaactgaggcccagagaggggagacggcccaggcccagggttctcagcgctgtcccagagtctctcccctcacttctcttcctactaagggaagacatcttcctctcctgccctcccccacccaggtcaggggaggtttggtgggggcagatggtagaaggttctatggagagggaagaggaggctgaggaaaaagtgaggctaagcgttctcctctcttaagccagtgggcaggggaggaagccagaagagaaaaagtctaaatgtgaccttgagcactggcctggcacagctgtgggaagaaacttaacgtccgtcagaaagggcaggaaaccaacatagacagggtgctcctgagtacctggctagcggtggctggggaagaggccttcagacagttttccccttttgcccatggctacagtgaaggaggaggattcacactctggttggtcacaatccacccatgacactgcgtcagggcctcccatccacccagcctgactgtggggcgcaacgggtagctgaggcaatgaacagctgtgagcccccatgcccacagggatatggagcctccaaagagacagaaggaaacaggcagatcttctgtgcttaaattctcctatgaaggctgaggtgactctcggggagagggccgcagcgaagaagaagagggggagaataaggcgggcctcttttggagggggtgggatgggctcacacatgcccccacagcctgccaagaaggccccagatgggccgaggactataggggtcccggctgccctcccccaaacctcccctcccttctctccctctctctttctcggctggctatcgaccggggctgtgacatggtggatcaatacggcagggatataaagccggctggctggctgcctgcctctgcctctctctctctcccttgcttgccttgcttccttttcccggagccgcacccaggtcccccaccatcatgtaccccttacccaggcctctgaggggccaggcaccccccaccactcccctacagcaggagagcttagggaggctgagagcttggacagccgggagagggggtgagtatgggagtgggcaaggaagcagatggggatgggggccatagtttcaggtaagggggctgggagaaattgagggacaatttctgggagaaagcaggcatcccctcaattgggagcagctcagaaagatggggccctttgaaggtgtgtgacggacagagctctgggaggtgggcagggggcacctgtgggttcagagagacactgtcctgagcccatgaggcaggggaaggtctggggtgggtgctggagtaggctacggtgaatggacacaaagaacagtggggcgaaccctcaggccggcctgcgcccacccccagagctgctggctgccccgcctttgggtccctgcgggtagaagttgccttggcctcaccccagggtctggcctgcacatgtgtggttggggtgggaagcttgtgcggcttcggacaggaggttccagcgagaggtctgtggtgtgcgagctgccatggacgcagggtgtgcatgtgtcctcaggctctgctgggggattctaggactgcacatacccgagcgtcttggcccgagtcatgtctgtgtgtgaacatgagttcatggatgtgtcccaggagcactgggtggctgtgtatgcacttccatgagtgtttccctgacgctaagtctctgtctgtcccttggggatgtatcccaggaacacctcagggatctcctctgtccccagttaatggggtagctatgtgttcccatgtgctctgggaagcctgtgtgtgttggcgtgcgcatgcccctgacagagtgtgtctgagcacggatgctgctgtgcgtgagcctccatgggtcccgtgtggatctgtgcctgtgcctgtgggcagctgcgtgtgcttcagggatctgcgcggtggtctctatgtgtactggaagcaggttctcctcatgagtgtcggagagtccatgcggtttctctgtgtgtctatgtgatgctgtgtgtccctgtgtgccgatggtcgagtgtgtttccacaagtgggctggaggctctgggtgtgtccctgtgtgtgtcatggtgacttggtgtagacggcacggtgtatgtgtgtagaggctacaaccctgagtctctgagtgggggagggtggcgaggcagcaggggctgccacggagacactggctagccggttttatcactacatcatctccaaatcccaatgtcagggcctgcctgccttctttcccttccctgccagagaccccagacccctgccaggatgggcccaggcccccgtccctcccccggcaccttgggcaggctgtacctctgctcctcaacacccctgctttggtggatgccacctcaactccaccaagcgacctccgtccctcccaacccccccagcgccacccgctccccccgccctccccccaccacaagtccagtccaacccagacaaaagcaattactccagaggtaggatgtgagtgtgggtgttagaaacaggaaaaaaagggggggacagggagggggagcgagagagacacaaacagaggcagggatggacagccagagaccccgagagacgacaagagaaagagaacggcagagtgagagacagaggcacacgcagagagatgcacagagaagcagagacagaagatgaaagagactggaagggacacagacaccaaaaccaggaggcaaaggcagagaaaaagagcagaggaagggcaaatgcagagagcacgacagagagagacgcagagacagtgactggagagacggagagagaaacagagaaagagcacacaacagagcagaaaacccagtgatggagccacacagagagaagacgcagataaagagagaacgggggccagaggcagggagaactagaaagggggcaatgcacagagaggaacagaaaggctgagtgagagtgagagagaaaggagaccagagagataaaaggcagacggcagatagtggtggaggggagttggtaacccactagagactctgagatggcaaagctagagagaaactgaaaggggatcacgtccaaagtgatgtctctcacacacacacacacacacacctttctccccattccccaggccagaagtcagggatgctcaagcctttttccacgttcctctgggcccctgtgagccacggtggggaggggacagggtgaatggacagggatgatctcaggtagcttcagggaccagccagagccgactgggacctgatcacatgggtagggagagcagtacatccctccttaccacacaccgccacctcaccctccacacacagtccacacacaccagggccttggccaatttcctcgtactctgccaggcatggccagcctggggggtggggggccaggtgtgaggtccttccttcctgccccacagtcctgcccacctgcctcagctgcagctgccccgcactgttttttctttctcattgtcccctgccttcagcccggctgccttcatctttctctgatgcactctcatgcgctcagctcgcatgcacgcgccctctctttctctctgttcctttctgtctctgagtccctcactctgctttcctgcctctgacttttctgctgtttcctcttcctctttgctcctctccgttgctctgttcccctctctgtgtttctgtcatgaggtgcatgctccctgggtctccctctccctccactcccatctggtgtattctggattcccctttcttagacaatccctctggccctcctatccacctcgtccccaagaaaagcaaggttgggcacagtggtcctagcctgtagtcccagctacataggagactgaggcaggaggattgcttgaaagtttgagaaaagcaagggtggatcactgtgtaaaggacctcagaagctgtcctggagtgctaggagtgggtgaatacttcctttcttgtttttccctcaatcaccttttatcctcctctctttcctaccccacctcacacccaccccaggccggatctctggatctccccagcctccagatctcagtgtggctctctctggagacaaaagctaagactcaacccacaggcaacactcaacacagagatccagctcagaaaaaaaggagctgaccagggaggaatggagaggccaagacacataatgaagactaagaaaaggaagaaagatgatgctggggctggagccaaagggagaggaagaggaaaggaaggaaagccaggggcagagacctggcagggcagcgtgagcccaacaaccacggggtgggggtggggcgcgcatcaagatttctaacaagcgcagctgaaaacacccagggccgttctctgaggccttctctctgcctaccagccctcaccagtgcttcgaagagccctgaggaacgtctctctatttgaagtcagagccgagtgcctgctctcggcacctggggctccatgcttaccaggatggtgggtacttgaccttcatttgctgtgggactgtcagggattccagggacccactggtccccgaactggctcagagatgcaagccatttttacctcctacacatctataatccccaccccatggctgacaaatattcccagtccacagctgtctccacccacccagtgacagagcacaggcagccaaaaggatcaagcaatctcttgccacctcccagcaccccagaatgctaaacagaccctcacatctggactccacatccagcgaggagtgcccctgcccaccacccagatcacacagctgccagttacagaccaccctataggtcccaccacacggccatagcccaccagcatcccagagctgcctctacactaaagctctgtcccagcccagccatccttcaagccacatctggaatagcacacaccctattccactagccaaagcccccaggggtgtaattcagaaggaggcagactgggcctggggcatgtggacaagtccctgacaccacgccctggcttctccggcttgtctgaagaacctgaactgcccttaaggcctgcgcctcccatcccagggcagcccccccgccatacctacactcttggccatgggagaatgtcctcatgtgcggctaaacatcctcctcatgcagccttgaattctgttccttccacgtcacctcaccagacccaggatgaaagccgctcacctagagcaaagcttctgcttccgaggcattcaggactcccctcagggtgtgtgagcaccctggggcacatgcctgttgcttatgtctgggttacctctgtgaccctgggaccgctccacattgaaggccgttgtgtctttttgtggaaggatggaaggacagaagggaaggagagacaaagtggtaccacagccctgttcttgccctggcacttggagggcaccagatacccaggggactgtagctggctgtgaggactctaaggccaggccagcatacacagtccccaatagtgagtaggagcccagtcagtccacaccccttcccatccactcgaaatgtaacttagccctcggcttctccttacctttcaggagttctctccttacccccaaagacttcctgaggaccccctaggccagccagcctatccctctctcccctaacccagcatcctgcagtcccctggttcagattggtggtgtctgtgcctgaacccccacgagcctgaaagcccctcaaaggccacatgggtctcccgcctctctgcatctccagatggtggcacgaggcctagcacacaaggaatcccagaaaatgttggctgaaggaataaatggatggatctaggtttatgtgtctgtttgctcacttatttattcattcagctcatgcttgctgagcacttacactgtgccagggactgagtatagacagatgtgttagacaaacagagaggtcccctcacccagaggcttctgagagcagacattaaccatatagaatataatcagatacggtgatagtgctcaggagggaaaaggaggcatcatccagcccatgggtcaagaaaggccctcagagttgaggagccttagatggggagctgaggaggtagagaagtgaagccaacccagagtggagagaaggccctgctgtgggtgggaggagatttggaggaagggccagaagggagaggaggagggggagtcacacgggagcataggcagcagaggccaccacaaccccagggctgggagggggtctctcactcatcctggggctccagctcccacatagagcattgaggaggcctccagacatgtttggggcatcactcaccttccaagtgtggctataaaggaaagacagagcaggtgagggcgatgtttattgtagttgttgtttcgtaacaaaactatacacctaaaagagtatggcttccttcaaagatgtctcctcaggaggccgaactttttcttgaaccacctgatattttggcaacagccttcaaggccagtttacaaactccatcagcaaagcatctctctagtgtataatcatctctagtttctattgaaaaaccaacaagtggccccagtattatcattgctaaattcatcagagctgctgctaaatcagacttcaggtggtctccgaaatcaaattcactcccaaagtgcaaaaatttgccacactgtggagataccaaaaacaatggtgggttttggtgaggtaaaagaatgagagctttaaggtcaggcaaacccaggttcaaattctaactctactgcttacatgttgggtggccttaggcaagttgccttcacgctctgtgcctcagtttctttgtcttgtaacaggtgccaacacccacttcacagggttgctgtgaggattaaaagcaaagtgcccagaacaggcccttgcacaaaggtggcccctaataaatatcagtttcctcactggaatgtaccagccctgttacgtgttaccaagtcagtcacccacatgtccatgaaatcatggatatttaatgaacatctatttgaagacaaataattgaaatcatagacctaacagtgacctctaccaactggaaacataattaaacccctctgttacttcagcccaactttcagacgttcctcaaagccagtctctagctcccaaactaattctgcaacctggaaattccttgactctcttttcgaggatgtgaggattcctggaaaaactgcaacttcggttccctggagaaagcactctagagaaatgacacatcctggaacaaacactctcagcgataacaggggtccatgaatgagcttcagggggtctgtgatcatcccaaagtgtagcacaactgggcaaatgtaggtatgtgttttcctgggagaagctctatactgttgtgaaactaggtatctatgggccaaaggttgcctgaaatatgttgtttggaccacgaggagattttgcaagttttgcattagttgccaacatttaaagattggaagacttcacacacaagtctgggttcctggcttctcttgaaaaatcagaaaccctggcaagtcagggttgcatctgtgcatgagaacagtcagtggagctaaaaagcagtcccccaccccatgcatttttcagtccatcatagtccctacaatgctgggttgcaaaccctgggctacagcttccatctgcttcttaaaatgagactgtgattcctggtacagcaaaggactcctacccaggagtcctacaagggcacccaaaggcctccctggggtcctgagacctgtgggttaagcttctctggtgggaataggggtggcagtagagggctgtcccaccccagaagccctgtccaccctcctccctagatgctcattgccagggcctcaccaagcaagctggagcaaacaccagggcaaatggccagagcccctgcttcccacagaggtgagcagcaggagaactatggcttctacctgggagtctcagtgggcttcagggaggggcttcataaaaccttctttgttcaggggaacgcttccagccatattttgagctcccacttcctgcagccacacgatttcaaggaataagtactttcatcttcacgccacctccatgtggtaaatgctattaattaccctcctttgacagatggggaaactgagccatgcccaggatcactcagccacctggctcttcttcctctatctccttttgctctcaggatggcacttaaggtgggttctattagtattcccatttacagacaaggaaatggaagctcaaactttcccaagtccctcgaagtcaggaaaagagattcgaacataggtgtgcttgaacccaaagctgtgatctgagccaccgagttacccccatctctctcctactgagccgtaacactgatcagcagaaacacccacagtcatcaacaccaagaaccactggtttggcccgaaagccacaggatgcatggagggtgagaacaaagcagtcagattctaacctctgggtgggcagagtggagaagggcagcaacacacccagggtgaggccagagacgaggatgggaaagcagagacttctgtgagaaaccagaaggtgcatcaataagcaaaactctaaggccgtggtccttacctcttgggcagacgcagcgaagctaatacattcaggccaccaacccggtccagtcgagaacctggagagagaggagaatgcagtcaacatcccggagaattccccatcctcatgcaggatgatgcactcctccagtggaggaaccctcctcctgtcacatcatcaggagctgcagttggctaactgtggagtcaggtgcctggaactcaggtccagtcagccacttgttgccttcagtagtcacttctggcctctgagcctctgtgtccccaactcataaatgggcatactagtgcctgccactgtggaacatctgtttttcccatcagactggaagcttcttaaagtgcagggactgtaactgtgtcttgaagcttttgtgtttggcagagggcctggcaaatttgagatgctcaattagtgcataacggacgacggagtgaatggatgggtggatggaggaattaactgattaaatggtgtatctcaaaggactgctacgaggaacaaatgagaaagaaatttgaaaaggttactcattattaagttcctatgtgctctggggagattaaaaataaaagtcataatgatatttctgacttgtacatttgtccattcatttgtgcatttagttcatcaacaaatattgagatttctctggctctgaatcaagtgtggcaggggacagagatgaattagacaaggtctctgctctattacggggctcacaggcaagttgaggagacagaaggaagagccaatgccaacatgctggggtaagcagagggtgctgcgggcatcctgggtgagatcacagaagacttagggaggaaacaacacccaagccaaacctggaagacaaattttaatcagagaaagaaccaggtgcaaggaacgagagaatgccaggactttgcctgtccagggttcagtaagaaaaatggggaaagacgaggcttccagattgcaggggctgctccctgcagggcgtcaagtgcctggtccaagcagccagggcttcgtcagagagggagagggatacaatccagtttgcctttggaaaggtccttctacctcctgtgtacaagatggagagaacagagaagtaggcaagaggtcaggaggcccatccccaaagagggtttgctgagcctctccacagccctgtaggaaggaggagtgaggaattaagggaggcaccagagttcaaaaggaggaggaggagaaagaaaaagatggactgagaaggagggggagagagaaagagaagagatggggagaaatagacagagaggaatgaagggagcgggggcaaagagaccagggaaaagcccaaacaagaagcaaaaggggggtaaaaagggccaagggtctccccacttcctcctccatctgtcctgtctctccctgggccttcatcttcaggggcagaaggggaccagaacccctggtccctgaggggagggaggagctggggttgctccccgctcaggggctgcttccccccagcccccgccctggagctaatcagcggctgtcatctccacagtgaggtcttggttaaggagatttagggccgggatcaataggaaatttaaaaatcgatgcagcgcgcagggcaaaatcgatggcgtttaatcgccttgccgattcccagtcaaaacaattagccgcgctgagtgttgaacacggtggcgacacggcattaaccgtcaatattggtgtaagtgatggggtgggcgagggaatccccaggcctcgggggggccagagtcagacagcgccttagggctggggtcttcccccaggcagtgcccccaccttgggcttccctccagcagggcccacacttgagtctccctgccctctgctacctggggctgtggtgcccataggcagcaccatccctggcatatctgcttccaactctcatcccatctcccgggttcccaaaccccaatatgccctccgacagaggggagaggatccctctcccaagcagacaacacctccaagtagagagacagtccatgggatctaggagctgtattcccagcagtgccttaagactgggagctatttagaagatgtcttcccccattgtacagatggggaccctgaggaacagagaggggcagcagctggcccacagttaccaggcacaggaagagtgggagccagaatttgaacctgatgtgtctgactccaaagcctacatttcctgcagctgtgcacataaagggtagattccagtgttcacagagggaaagcaagctcagggtttggtcctggcccctcaagtctcctcacagccagtgtatataatggtttgctgtgtcctggggtcagtttgccatgtacatggcagactgtgagctccttgagggcaaggcagggcctggctcctttgggggtccgaagcattgcccagcacagggaatgaccccaagccagggcttgggacaggcctaagaatgatgacgccacttgcccccacagacacagaatgcccacatacaaccccaccgatagacagatggaaacactggcacccacagacacatcagtactggcatttcctgagtgctggtcatgcaccaggggtgggtcattgctctgcaggtgtgatctctcagcatctcacatttgttcggcgagtgtcatcccatgacactgctgtggaaaatggaggctcagacaggtaaagtcacttgctcaaggtcacacagccaagtgggggcacctctatctgattggactccgaggggcatgggacatacagcaaacaagatctaacgactatgagcaagagaggtggatgcaaggagaaggtacaggaactgggcacctaaacagagaaccaggaatggcccacaaagggccatggggctcccggttctggggtgctgtgttgggagagagaggcttctgtggccacctgctccctggagcagaagaacaggagggagtgtgtgggcagaggaggaggcccacgagatgagccagggattgatctgacaaggtcctaatcaaatggtcaatatcactgacctgaccacttaacctattgataagctggcaaggatggagcaggcggtgagtgggctcagggaggggggcagcggaagggatgagggaagcctgagtgggcaggacataggccggcatcacgcctggctctggggcctggaagagggtggtctcctcctcaagggcccctgctgacacggcacatgtcttatgtcttggtggcttcctctacccaggcttttctctcctctcgggatccctcagtccctccctgagggaggccagggactgttgctggcacccaagtggtccccggctcccctctgactgtgccttagcttttcacacatgtgagaggcttcacatccaagcctcaatgtcttcatttgtaaactggggataattataataggggaaatcaaaaaccaacctagatatcatatgagtggggactggtacaataaatgatagtatagtggccatacaaagaaggactgtagagttgttgaaaacatgtttgaaataaatttttttttacacttctctcagctcataccatgaaataaaatcattgacaacgaaaccatgttcataatctgttgttaggaagaagaaaaggcaagttataaacaagtatgtagcatatcatcccgtttttacaaaatacacatccagatggttcccccaccaaaaataaataaatttggaacagaaatcagaattctgagtttggaccagtctggccaacatggtgaaactccatctctactaaaaatacaaatattagccgggtgtggtggtgcgcctgtaatcccagctactcaggaggctgaggcaggagaatctcttgaacccaggaggtggaggttgcagtgagctgagattgcgccactgcactccagcctggacgacacactgacattctgtctcaaaaaaaaaaaaaaaaaggccaggcatagtggctcatgcctgtaatcccaacactttgggaggccaaggcaggcggatcacctgaggtcaggagtttgaaaccccatctctactaaaaatacaaaaatagttagctaggcgtggcagcagacacctgtaatcccagctacttgggaggctgaggcaggagaatcgcttgaacctgggaggcagaggttgcagtaagccgagatcatgccattgcacttcagctcaggtgacagtgcgagactctgtctcaaaaaaaaaaaaaatctgagtttgggtcccaggtatctaaattttaataaattatttgggtaaactcatagccataatctcctttggagaaaaaaaaaaagctaagacagtcagggtgcaatggctcacacctgtaatcccagcactttgggaggccgaggtgggcggatcccttgagcccaggagtacaagaccagcctgggcaacatagcaagactctgtctctacaaaaaatacaaaaattagctgggtgtggtggcgcatacctacagtctcagctactcgggaggctgagatgggaggatcacttaagcctcagaggtagaggctgcagtgagctgagatctctccactgcactccagcctgggtgacaggctatctcaaaaaaaaaaaaaaagacagatagcaaaaggtaatgtcctttttgttgttcgtttaactagattatcatggtcattttcttctcatctcattgaatttctgttttctgttatttctacaatgaacatgtgtcacaccatttgtctgtaattgacagactgtggctaggtacttagtggaggcacctctagtgctgtttctctgcttccctctccctttcccagccaggcttgtcttatgtcttcccttatgtccaaacccagcagagttcagtgccctcaagaatgtgaatgaatttgaagtctgctgaatggagaagagctcactcctctggcttctgctctcaatagagtgggcggggtagtaccaagccaaatacagtcccctgtcccctcttcaggaaactggctgagggcttacagacaggaggaactgctggagggaaaacgaagacccagagggagggaagggattttcccagagctactcaactggtcatgacacagctgggaccagaagctggggatctgggctcctggatcagagtagtgccatccaactactgggagggggacaactgcaagaacaagtgtgcatgcagactcctgagataatgtgcacttctgtggggcagaagagcacagtgggtaaacatggggtcggccacttcctcactgtgtggccctgggcaagtcacttcacctctctgagcctcagtttgctcaaacatagcatgaagataataataacagctgcctcattttgctggtgtgagaagccaacaagaccgtgcttatagggaacttagcaaaaggccttacacacaaaaaaggggcaatgagtgggagaaattaatactattaccatcagcagccataaatgctgtgagtagtaagtgaaggtggtgggtaggtaagggagaaggtttgtcttggtaacctgagcaaatgaacaaatgcaatgaagacactcagctaaatatattcctttgttcattcattcattcattcagtaagcatttcctgaggccaattctaggccagatcccatgctgggccctgcaatccagatatgaacaatgagagctcccattaggttggtaaaggggaattaaggatggctggggatggccccttatctctgacagttgctgccgcaatggcccccaaactatctcttgggccttctgcagaaaaggatcgagcacaggagcacaagctccccatcacctgactggtgtgacactttgggtatgtgtgtgcacacactggaatagtaagctctgtgcagatggactatgttcacttttgtcattcacagcactgggcaccaggtctcatgctctggggacactctatgctcagagtttttttttttcctccgttttttaaaatgaacaacaaaaaaaagttcaaagcaccttgcacaatgcctaacacctggcaggtactcaataaatagcagctattattagcgtcatcatcacacgtgccactgctcttcatcccaacaaaaaccttattttgccaacaaggaaactcgaggcttaaaaggagtgatgtgactcaaagccgggtgtgtctgactccacagtctgtggtctcccctcctttgtgtctgggggcaggggccatcagagtgtatgctggaggtgaaggaggggaagggcagcagtgtgcgtcagggggtgagcagatctgacaatgggagtaaggaggagttgattggagtgaggggagggtcgtgagggagatgagggtgcaggatgggagcatacaggcccaggatgatgatggttttggagtctggctgctctgaggctcaggtaggaggtggactcacttgccaatgtacccctccagcactggtaagtgctcaccctgaaggtgagctctgccacccttgtctgacacagcagacgtctacctccaccattatattgggcaagcaggtgatatattgggcaagtaggtgatatattgggcaagtaggtgacaggggatccggcttcagttcatttgacaaaacattcaatgagcacttatcgtgttctgggcactgtgctacacactagggatacaactatgaacaacacaaagtccctgccatcgtggaatccaccttctagtggaggaagagatatgatacacaagaaaatatatttaagacctaagaaggaaaataaagcagggagaaagtggcttacaagatgctgctattggccaggcacagtggctcatgcctgtaatcccagcactttgggaggccgtggcgggcagatcacctgaagtcaggagttcgagaccagcctggccaacatcatgaaaccccgtctctacaaaaatacaaaaattaggtaggcatggtggcgtgcgcctgtagtcccagctactcaagaggctgaggcacaagaatcgcttgaacctcagaggcagaggttgcagtgggctgagattgcaccactgcactccagcctgggcaacagagcaacactctgtccccccaaactccaaaaaaaaaaaaaagctgctattttaaacataaaggaaaagcctatcagagaaggtagattttgacagctttcctggcaaaggaaacagcaagtgcaaaggccctgggtcaggaacaaggtttaaggaacagcaagaaggccagaatggcttgagcttccagagccaggagggagggagtaaaagttgaatagacagacaggcgctagctcatacagggtttgcaagccaagaaagatgttctaagtgtgatgggagaaatgacaggctctctctgtggcaggtgagggttggtctcaccctcacaaaaccaggctccagcctcacccattgcccatattgcctatggggccttctgacccattcattctccaagaacaagcccaagaagccctcagtaagccctcggagtcccttgacagggctttgtcagggtcaacctccccagactgaggactactctagaacatggaaagatctgcctcatctgggtgactgggcatgcagctcaggcctggccacaggaggctcagaaatcaatagaacgtcagtagaaagtaagggtgactatagctcctgacctccattccctagcaaatctccatttgggggcaagtcgtagcagtggccaagatatggggctgggagcaaggggaaggtagttctgtaccacctccctcaccagaccttggccagggttcccagactggacaggtagagcagaagtccttgtgactggtggcctgctcactggatcccttcctccaggggctacccatcctgtcctgtccccacacgaggctcagagagatcagacttggtacctggctcacatgctctgtctagtccctctcaaaactgttttgtggttatgtggtgcgccctgaataaatcccaagcctcacagtgcttcccagtcatgtaaagtctcctctcagtcctcctgaaggtcccgtgaccctgggcctcacatgattgctgggaacagtctaggcttgttcacatgtccatgcccttgcccaggcaagcatctccatttagacagtcttctgccttcttctctgcaccttatcaccctctccatgtctcctccttggtgaatcttcctgggctccccactcagcactgccccagaatgctttgtgcacctcatccagagcccagaatctgggccccaggtgaaaggatcccatttcccacctagggacatgccagaggagttttctagagggaaaagtgcggcatagtggggtaagggtaggggcatctgagtgctgcattatttatgcctgtgtgggctctgtgagtttcaggagggatatgtgtacacatttagaatctgtgtgttgtgcctgatgtcaagcttaaatgtcacttcctcagagatgttacacctagcctaccaatctaaaccaggttcttccgtgatgccctcctgtagcccctttttcctctccttaccaggtgtatttataactaactatacactgaggtctgatcagtgccagtcctgttggcttggagctcttagagagcaaggcccaggtctgtctcgtaaaccactgtttcctcagcttctaagacagggcctgactcctatagaggctcagtacctatgtgatgagttaattaattctatacacattttcacacttgaacatctacctattttgttttgctttagggggatgaggctagcctggggggtgtttgtgtgctataactcagggcatggccctttcggtcaccacgtgtggcctccctgtgggatttctgaatgtggcctgtgtgcacccacaggcatataggctgggatgctgccatgttttagtatttctattcgtacattttctattgaaaaacaaatctccacacgaggagcaccctggtgttttggtgtctgtcttgccctgagaggtctcagcacctatgtgcctgcacagacatctgggttttcatacctgtgtctgagtatgtgtttacccctgtttccaaacctggtgtgtccattttggcatctctgtggacaaatatacaaacgtctatgtgcatctgcagggtttagcatctatgaattttcttagggaatctctgaccaaaagtatgggtatctggctcccaggacccaagggtgcacatggctaccatgtgtttcagaatctgtgtatgtctcttgcaggatcattgcatgtgtctgcatgcttatgtatttcagtatttgccttgtgcatccgttcaagacttacgtggcctctctagtttggcgaatgagtgcgcgcacacgtgtgtgtgtgcgtgtgtgtgtgtgtcggggtgatataaacacatgtgcgtgtgtacctgtgtgtctttcttcccctcgctgctgcgccttcccagtctggatgagtaccttttctctgtctctctctctctcacacacacacccttgctcatatgtgccttgcagatggggagggggccggggtgtcagcgagctcctgtgtcacaaggttaatttctccacagccaggcaggctgggccctgaggggagtggtgggggaggggctggtccccacagcccctctgataaatatgtatttggggctgctgtgctcaaaggtcatggggggaaaaggaggaggaggggtggtctgcactgtgctgtgctgctgggtcccagccaggctcagcatgggttgtgtgacccccctccagaggtctgatgagattcagggagatgcccccctcatcctggtctggcccactccacccacatccatgctccgagggagatgctgctgtggacacacagatattcaaactctgaaacaggcaatcacacaagcccacacccgccgacacctagacagaggctcaaacagatgcacaaagacggcctcatgggccaccagatacatggaaggctcagagtgcagagccagacccatcgcttcttccccaccccaaccttcaacccaacgccaaaaaaaaaaaaaaaatgctcaagagtgcatagtgtctcacagtaagaaagctttctacacattcaatagacgcaaacacacacacggacccaaaaatgcagagtccaacaagaaaggtccctgaacactttgtgggtgggcatgtacacatagacgcacaagcaaacacatacacaaaggcacatacatagatgcacaccaggagtcccaaagatacaaagttctacgaaggtaggcacatgctgacaactgcagataaatgtatgaacacacatgcacacaaacatgcacacatacaaagaccccaagacacacacggcaggcaggatgcatggtggatccaggctgggaaacccaccctgctgcaacagagccggatctggccctttccccgctgaggcgagaatggctgcctggtctctggtcatgggcccccagccagcttcagccaaatgcgccatcatttgtccagctctgagtcacatcagttgtcgagcctcccctcctcgctgaccagccatctcggccatcagcggcctcggccattagtcggctcctgcctctggcctgcatttgttgaatctcccttacctggcagaaccgtccggaccaatggaacccttttggagtcggcctgaccttttcctcaagggattccgatgtaccctgttgtatgaccctcggcccatgcctcagggcgaccctcccctcagcacactgctcaggctgtcattcttcaatgaccgctggccacagtagttctggtggattgtgaggctgtgtgtttgagtatgtgtggaagtccgcttgtaggtatatgtgtatgggtggtgggatggctatagctgtgctttaagtcaaaatgagtgtgtgtgtgtatgcgtgtgtgtctgtgtctgtgtgtgaataaggggataggaagtcagcagctgtgcttaaagtcagagtgcctgagtatatggttgtatatatggggagatggaatgtcaggggctgcgcttcgtgtgtgtgtgtgtgtgtgtgtgtgtgtgtgtgtgtgtgcactttaatgcaggagtgacttggtgtattggcctgggcttggcgtggggggccatgaggggccgtgtctgttttgggcatggggggcagtgcggtacaggcatctgtttctcaagcagttgtgagcaagtggaatgtgcctctctcagactccgttgcttgtgtttgtgaaagtgacagatgctgcctccctggcctcactgcggcggattaagtctgtgaatgccacatgagtctgcaccccgggtgggggagggtccccagtctgctcttatacttgcgtgtgtgggccacagccctatactttataggatcctgagagtgtggactaaagtaacccccaaccttgttggtttctgtgagggagaccctgaatggatgccagaataaaggtccctgtgtgtgtgtgcacaagcacactcatgctcatagacaagtccgtattgtccaaagtacgttgtcacgagatgcatgtgtatatgtgtatgtgtgtgtgattgcaggcataatagctccccgctgccagccagatcaagttccaacttctcagagcagcagctgagcctccacagacagggccttgcaacattgtgccaacctctactcttagactacacctccaacctgggctgctttctcctcactttcctctgccatctttatgccctgccaccagtctgcttttctcagtatctgagcatccttaaagactcacctccctgtctaaacccacaccatcttcattccccagattcctaatgacctggaaactccctttgtgctcacagtccaggcgcccagaatcctgtctaaggctgggattggttctgcttcagagtctaggcctttgttggcccatggtcagtgcctagcgatcattttcaggttaaggagtgatcataccaccattgcccgattacctcagggaactcactggactttatttgttcagtgattcacaccactcaataaatacctattgaatgcagggaccttgcatgtggagccaccaccttcagcctccttccgaatgcgtcagagctgggaaagctgcctgtcccgaggatctaatgaagttggggtggtgatcgagtgagggaaaatgcacctgcctcccaaggccaccatgtggatctgaaaaggtgacacagggctcaccaaaaggggtaggggggaccataagctcatgcaaacccctgtgtttgaacaggcccagccccaaaccatcactgatggaacgagctcaaccatgctcatttgctggctctcccttcaggatataaagcgagacccacatccttagagccctcactgaaccacataaggcatccatccacccgacaggtcctgggagacaggtctgtggatggacatctcagggggcagggaggaagtgggggaagagacagagccagtgaaaggaaatggcgctgggacagctaatgggataggacagacctataaggacagacaaggctcggtatgaggaggaccttggttctagcgccagcatggttgctgacaggctgagcaaatgatgtgggcctcagaattctcatctgtgagagggacaccactggggctgctgtgagagcgaggtgggtgtaagggacatcatggtcattattattattagatcaagaggtgttgagcccaagggaaaaatgatgagtgaaatatatttagaaggaggaatagacatccatctgaggaggccttacacccactctgtcttctaacaactcttcacacttgggtttctcaaccatctccatcctgaaatatcttggaaattaaccagcacatgccagagatggaaacttctcccttgccatcatcgatgtccaagtagcccctggtgtggccatctgtccctgctcccctcgttgcaagtcatgcctctacacattatgattatgcaccagggctatgaaaagctctacccagtggggtgctaaggttggggcccttgctttgctgtcacattggtggaggaagaagttctggcttataggccctgcatacaagaagggagtgtatatgaaccagaatggaggtggcctggagtggccactgacggacttgctagaaaaaaaaaaaaaaaacacctggccagcatgctgtctaggacgtataggctaacaacctctacacacacagcatgggtataggtgtgtgcatacacacacactgtggctgagttctttccctactacagccctgacacagacaccttccattttccctgcaaagactagcagagggaagtgagcgcaaccaagacccccaaagatgacactgcaacctgccacagagttcaccagcacatgccagcacagcctcagggaaatgggggtctggacctctccaacggcaaggatgggcctctgtccagcattacccataaatcaggaagtagatgtggaatcgcattatcagcaactggagatgctgcctatggccctgatcggctttactcctggcctgcctgtcaccccctgacatgggacgctttgttactacagaaggtccagggaagcttttcatgggctgatagactgtggggagaggggatcttttcttgttttgttttcttgaacccagcttcaaggctgctgtgcaagcatgccgtcaaactcagccatacgcccgcgacctctgtgcactcacacatctctcatcactctacccagaccctgcttcacaaacccaccctccctcttacccaggacacgcagagaccccgagcaataacaataataatatctccatgcagaaatggtactttcacatatgtgactttttttgatgtgcacccttgtgtgcacacactatgttcagacctagtacccatacacagagccttcactccaaacacgctgcacatacaaagtgtcacgtgtccactgctgaagccagactcggcacatgggcctgcacacgcgtggacggcttccacgcacagagccaaagagggcctcctgaatgcacacatagcgagtgatacataaacatcaggacgagggagagatcagtacaaatatgcactgactcccttctgcacatatgtcacccatgatggggacccccagtacccaaccccccactgaaaacacatgtcacgattctacacctttggctcctcactctgccaaggcttcgaggcccagcacacacagttagtccttcctgaacacatctcaccacacatgcaggccttatacacatgcatgctgccgtcatggtctgactctgtacccaccagccccccactgcacactgactctgtacccaccagccccccactgcacactgactctgtaccttccccttatatcctggggggtggaaggacaaatccacctgacaagatggcaagagactaaaagctactgagcgaagcggctgattgggtctttctctaaatccaggacctactccccaactccacaggccccaggaaggaggcagaaagtggggagtggtcatcaggccaaaggctttctctcaggatcttttacctggactcaaaagctctaaggactctctcagatggacttccgccccaatttcctcccgttttcacttcccgctaggcatccatgtcattttcttctctgtccacacccttctcagtggggctgagtcgacagccatgagccctcacttaagatcttcccctccccctcccagagccccagtgagcatccagcaggacttctccaggaggccacaaggaagtagggggtggcactagaacccaggggacagacccaaacccccactcagggtaaaaaagagggtagaaatacatggggtttcagaacaggggttaggctctggtaggaagttggggattcctgcctttgcatggagcccctttccctggcaccctgttgaaggccagagcagcaagagtgatgaataaatgaaactgagggagggggtagaaagagctggcaacaggggaaatgagtggcaggaagggaagaataaaagaaagggggaaagggggaagggaaaaacggagaaaaaagaagggaaggaggtggagataagggaggtagaaaaagaaaaactaaggggtggggaggaggagaaagagcttttattgagaaaaggaagagatagaaactgaaaaacagtgagaaagaaaaaacagtaaaggagatggaaataaaggagctgagaaaggacatgaaaagggaaagaaaagagaccaaagaggcagcaggcagtcgaaggggttccccaagttacagactttgtccagagagctgaggggtgcaccgcggctccccaacctcactctggggccctggagctccgttttccacctctcctcctgcctgagatgccaccgcctctgagtgccccatcccggctgctttttcctatttctcaccgtttctgctctccaaggcaccccgttcctttctctcacccctcattcccaccacccagccctttctcgttccctgtgccctcttacctctccccccccattgcaccctgcttgcttcggagcttcagacagcatcaccgaccaatatcctcaccatcatcgtactaaaccggcccccacacctccaggaaaagagagagagagagaaaaaaaaaaaaacaggcggaaccgccaccagccctgaccccctctcgcctcattttctccacagtcgccccttcctcaaatgcagggtcaaaatgggggtcccgcccagcccggggagcctctccgaagcgccgcagccagccgggagcagatgccacctcgcctctcttctctgtcctcgctcctttttgtgttcagtggccctggttgcgatgtgttttattttcatcgtctttttattggtattgttttttttctctttttcttttctttattttttggcccgggggcagcagcggcgaagcgcccactgcctgcctctttcctcagctctgcggccgtcaggctctttctctagtctgcgctcttgactccctcctttctcttctgcctcggctctcgctcctccgctcctccgctcctccgtcctttcagctccgtcctcagccgactgccctctcctctctctactgcttccccctccacgcctctcctttcctcatccttcttgccccttctccctttttcctctccctcttcacctcctctccgtccccatttctttccatccctgccccccgcccccacgtacacctctcctttggttccctcactgccatcgagagcaagctgaccccccccatccccaaataataaaaatacccagccagggggcaaagccccggcgccgggcgccgagagggaggcgagagggccggggccgcggcggcggctgacagccggagcgcggtgcggagtgagcggcgcccgcccggctcccgcccggctcccgcccggagagctctctgcaataggccgagccggctgcattaagcttcttgcaatcaataaagcgcgggtcagattatgcaaagcgcagatattaatatgcaaagttttaaagatttttaaatggaagggcaagcgcggcgcgggcgggcgggcgggcaggggctgcgaggggagagggaggaagggagggcaggcgggcgggcgcgcaggcgagctggggagaggaggaggctgcccgccgcccgcccgcccggctgcgccgcgccgccttgccttaccgctgctcccatcggtaggcgccgctgtcttcgccatgcgcgtcagctgcacggctccgaggggatggccgaggaggagccgccgccgccaacgctacccccgctcccgctcccgctcccgcgcccgctcgctgcctgctgctggcgctgctctggccgctgctcctcgcctgagctgccggcgcgagcccaggcgcgcgccatccccggctcccaccttgtccccatggcaaccccgggcccaaggatgctcagagagagagcgcgagcgagagagcgaggggggagagagggagagggagagggcggggagcgcaggggacacggaggcagggagaggcccgagacccacagagacacagagagacacagagacggagagatgcagacatatgcagaaacagagacacagagatagaggagaggggtaggaatagaaggggacacggagacaaggacaatccttgagaccgacagaggcccacagagatactgagagacacagagacacacggacacacagagacacagagacacacggacacacagtaagagacagaggggtaagggcgaggggcagggagcagagagggattcaaaggtatggagagacactgaggtccagagactaacagagatactcagagacacagagacacccagagatagagacagagaaaaaagagagaggggacaggacagggagcacagaagatgcagaggcagagaaagactcctagaggcagagagatgctcagagacacagagacacacagaaacaaatagacacggggacacacagaaaagagacagagaagggtggggagcacaggggactcaaaggcagggagaggccctaaaagccagagactcaaagagacacccagagacaaagaggaaaaggagaagggagagggcaggaagtataggggacatggaggcagagagatgtccagagacacacagaaatatagagacacaggaacagagtggggggagaggagggaggagggagcagatggggacataaaggggcaccaagaaccacagagacactcagagacaaagagataaggagaagaggtccatgcagagacagagatgcagagtcagaaagatagccacagagaagtagacacacagagacagagagatagtgaaaaaatatatatggggagagaaagagactaattcacaaagacagagacacagaaataagagagatagatatgcacaaatcagagataggagaaagctacacgcaaagagagacaaatgaagatgtaaggcagtgttgcagagatacagagataggaagacatagagacagaggcagacacacacagaggtaagagatatagacctgcggaaacagacagagattaagaaagagccgttgaaagagccgttgaaagagacagagaaacagagatggagagatgcaaagccagaaagacagacattgacagagaccaaaagatacagagactgagactgagacagagaaaaaggcacagagagagtcaaacaaggagacagagtcaaacaagaaggtgtagacagaaacacagagaaatatacatagggattctgagagagaacctaagaaacagagacagaaagaaatgtgcaaagagagaaacagagatcaagacataaaaagagatgaaaagaaatacagagatggtgagagaaagaaagcaaagacagagacccagagagtcaaagtgaggcagagaaatgcagagacatggacagagactgcaagaaagtgacaggaacagagaaacctcaggagacacacagagagacacagtgagatggagaaaggcactggaagaggctttcagttggacagagatccacagagagatgcgagacagagacaagaagagacaaatggagagtcagaaatagagaatgaggtctggtagacaaggctggggatggggggcagagacagagcccaggtaaaggaggaagggacaggctggggtgaaagcagaaagtaggaaggtgacaagagggtccagggaagcaccaagggggaaagggcagacaggaggggagggaagaacagcagaaaggagaggagtggggaagggagaggaggggaagaaagagaggagggcagtgcccagtcaccaagcacctcccctgtgccaggcacattatggcttggagacagggaggaaggaaaggaaggccaagggtgaaggggctccgaccaggggaaggtgggcacagggtcttgggagggtgcatggctcccgccccctgcaggcgggggtgcagtggtgcaaagaggaggatagggttgcaagtggtacccagacctgggagggggtgtgagagggagggaacaggagggggaaggcagggagggaaagggaggaggaggaggaggacgcaggcacgcgctgcgcggtcttggcttagcagctgcaaccgcccttcgctttgttaccagcaaggctaccccatgcatactgagtggacacgcgggaccctcatgtgtgtgtgagaaacacgagaatcaccaactgcccacgtgtatggagaacgctcccaagacctacactggaagtgcgtaacataaataaatataggaaacacctaccccgtgggcgtacaaagtaagtacccaggacctgtgcagcgtgtgcataatagacacagaactacctactactccctgtacggagcagcctcctgggacccgcactgtgtgcgcaacacaaataaatgcaaggaatactaccctctgtccatacaaagtaggtatttgggtcttatgcagcagatgcataatggacatgggaccacttaatacccccatacagagcagactcctgggatccacacagtgtgttcacaacacaaataaatacaggaaacgcccactccaactgcacacaaactaggcacatgggcctacagggcatgaacatagtggacacggaaccaccccatagccacctaccaaccagcctccctgggacccatactgtgtgggcacaacataaatgaatgcaggaagtaccctatcccccatgcctacaaagctggcacaccaacctaatagacttagctagtgtgaacataagagacacccatgagcaggttctggtgatccacaaaggcacataacaaaactgaacataagaaacacccactccgcttgcatacaaaggcacatggggtcccaatagtgaggagagaactcaaaaaagggtgtatataatgacaacccacacactatccattctggaaggagcaacaaggaatactggaccctgcaatgaatctacccagcagactcccaggtccctccatctgtacgtgtacaatagacctaggaggagctatggacagcctgagtacctactagaagggaagcagggacagggcagagaccaaggatgtcctgttccctgccttggccctggcacctacaaggaccagtacatgggtggggtggggggcggtcatccttcctaagaatgaccaagtacataataattgtgtatacagtgagtatacactaagcacacagcaccaatgtttgtctgtttgtttgtttgtttgttttgagacagggtctccctctgtcacccaggctggagtgccgcagcgtgatcatggctcactgtagcctcaaactcctgggctcaagcaatcccctcttgcctcagcctcccaagtagctgggactacaggcatgcaccaccacacccatctattttttttttttttaagcagagatgaggtctccatatgttccccaggctaaagcaccaattttaaggatccaaaaaacttggtttgatatgtgctaagtccatatcatatgcttacttgccagtatgttaagagtctgtggtccacaacctatgcatgattggtatcttaattatccagaatatccatattaagcagaagctgacatccctcatggacttacaaaagtcagatccaataggagacttaagcaatccgcacatgcaggttgtcctaactgatttctagggctccgcccagccccgagtcatgattccacgaaggctgatgcagcacatgtatacacaccaggcacatgcaaagacgtacaccatacactgtacacaacacagcaaaaacatgtgtgctctctctgcttctgaaatagcataattccagaagtaccagattcctctgaggaatgtgtgtgtgtgcatgtctgagtgagggccatctctgggtacaggtgtgcatgtacatggctcttcctgtacgaatgagctcagctcttattccctcctcattctgcctgttcatctttcagaaacatgtatacaaataatagtacctgatgtatactaagtacaaaacattgcaagctatggatgaccttaattgagtgtgtgcgtctgaacatacatttatttatttatttatttatttatttatttagagacagagccttgctttgtcactcaggctggactgcagtggcacaatctcggctctctgcaacctctgcctcccgggttcaagctattctcctgcctcagcctcccgagtagctgggattacaggcgcatgccaccatgcccagctaatttttgtattttttagtagagacggggtttcaccatgttggtcaagctggactcaaactcctgacctggtggtccacccacctcggcctcccaaagtgctgggattacaggcgtgagccaacactcccggccttgaacatacctttagatagatgcatttgttcattaatgaaacatttgttcgcgcatctgtggccatgtgtgtgcgtgtgtgtacatcttggtgtcttggttacaagtcttggggctcccttataatctctgaggataaagggtgtaagataagggaaacgaaggcacacaaagcaggaagggaagaaactggggagaaggaaaaaagtggtgcaaggacaaggagcaaaaagaagagacctgttattcaggaggctgaggcacaagaatcacttgaactcaggaggcagaggttgcagtaagccaagattgttccactgcactgccctgggcgatagagcaagactctgtctcaaaagagagagagagagagagagagagagagagagagagagacctggaactggaactggatgtatggaaggaagggaggaggccctgaggacacaggcagagggagatgtggtgcgggagcaaggaagagaacaaggacaggaggagaatgggtgtgagagaaaagaggaagctaggaggaggaagggaggtgaatggtgagcagagcagagtgagggtatcaggaagagtgaaggggactggggagaggagaaaggagatgggagaaggagataaagaccgaagggaaagaaataagaaacagacagaggcttttctggtctgaatgaaatttagaggttgccccagtggcctcctatgggaaggtgttcgagtcggaggatgaaggtgaagcaaaagagagaaaggaagaggaatcacaacctagctccctaggatggggcagccagctgtctccatcatcctagaaggggcccagagacagggacccggaggcacagacagagaggtatgcagagctggactgagatgtggagtcatctgaagtgggtagggtcctgggacaggcaggaggaggagtggagagacttgcaggctcagggaggccagggctcagtggtgtggagacttccaaagaccaggaggaggctggagcaggcaatggagcagggccctgagaccacaagcggggaatcgaagaccaggtaaagggaagcaggttagagaagggcagagaagtgagggcctgctgagcagaaccagccaaagtaaatggaggagcagctggagtgggatgaaaaggccatgaggcatcttgcagatgggtcctgccttatgcacacccgggttcagaagctctcccaggctgactctccccaagcattcagtttggttccatttaagacatgcatactgaatactatcacgaattagcactatgctgtaagctgaagaaacaaatgcaaatgagacacaactctgccctcatagagaccctcatctgaagttgttggtgggggagggaatgaacaataaatacacagttactgatacacacagcaacacagaagtacctcaaaaccaaagtgagagatgcagaagaccacacactgtaggattccatttacatgaaattctagacagcaaaactactgtgacggaaaagcaaatgagtggttgaaaagggctgcagtggaaggaggggactgacagcaaaggcgccggagggaactttttagggtaatggaaatgttttgtaacatgattgtggtggtggttacacaactgtgtgtgtgtgtaaactcattaaactgtacatttacaactggtgaattttattgcatgcaaattatatcacaataaagctgattgcaaataaataaataaataattaccagccagaatattcaagactcaagatagggctctatgggagccaagaggaggtggatggggcagtgacggaaggcttctgagaagaggtgatgcctgagataagacctgaaggataaacaggaggcaggatggagaaagcgttcccatggaagaagagctttcacatggaagcaggtgagaactgaaaaaagttcactatgttttgaacacagaatggagagtaagactatcaagaagtgagtgcaaagaaaatcagggttcaaaatacaaatccattgctattcgaagtaccatgttgaataaaacccacctgcacctgaaaaggcccagagagaaggaaactatgagacacgactggggattttttttttttttttttttttgagacagggtctctctcctccctctgtcatccaggctggagtgcagtggcacaatcacaactcactgccacctcgaccttctcctgcctcaacctcctgagtagctgggacgacaggcgtgcaccaccacaacctgctaatttttgtattttgtggtagagacaggtttttgccatgttgcacagcctggtcttgaactcctcggcttaagcgatctactggccttgatctcccaaagtgccaagattacaggcatgagccaccgctctgggccaagactggggatttctaattggcctcctgtctgccccacagaaaggtctccttcctgccgcccttcccagaacttcctccctgctcttttcacatggggatgtctctctccattaggaagcagcctctgctctggacctatcccccaaccctgcccacatctccaagagtttgtgggccccagtgaatccctccaacctggattccatgtggccactgccccctggtggctgaagtgatgcatgactaaggacgaagggacacctccaagtccaggcccagcatgcccttccagaggccagtccaaggcactcccactactgccccccaagacacacccttgtccctgacagtctcctccttgctaaatcctacaagcacttttcagtcctatctgactctcctctgcagcatgcagccacaaatatcttttcaaaatcctcttggcatctaagaaacctcactctcttggttctccagctctgtctgggctgctctcccagggtgaatcatcccctcccacaactgctttctctatgctggtaatccctaaatttgtctccagtttagccctctctcctaagcttcacatcaggatacccagccacctcctagaggttccaaaaatacctcaaaatcaacatgtctaatctaatcatgtcatcttctctaccatgcccctagaccttggttcccactccccatggtgatactccatccaatctagcattcaagtcagaaaaattgtccctgtccttgacaccttcctcttcctcatattcacatccaatcaggattgaaatcccatccagttcatttacttcattaatattaaaattttaaaccatatgaaattgacaatatcacccagctttttcttacaaaatgggaatttcatagagttcaaccgagtatttctcaaatccatctcctcctctcttccctgctcccagtgtcctagttcaggcctccacatctcctgcttggcccatgaatctccttactacctggcctcccagtctcccctcttgccccctttctagtctatcctccacactggctactggggtaatgtttctacaatatggctctgatcaaatcactcccctgcttcaaactcttacttcctgttgcacacaggacaaaagccaaactccttagtcagcttttcagacccttcacagtaactggctcccctccctctacagggagcaccactatgcatcctgtactgcaaccacaccaaaccaccaccacttccttgaatctgcccttaacctcttggcctttgtacttgcagttccctataactggaatgcccttctcactcttgtccccctggctaacttctatttgactccaagaaccaacttaaaatcatatgttaatgtaaacctccagttcatccattcatccatccaatacacacagcttgagtatctatacttgtatgacctccatagaaggtaccggggacacaaaggggaataggacacaattcctgccatcaagaaagctcacggtccagtaagagacacaaatgcatatataaatcacaacactatagtgtgctaggacacaaaactagactgggaaaattgaattttacttatttttgagatgccgtttcactctgttgcccaggttggagtgcagtggcactattatggctcactgcacactcgaactcctgggctcatgttatcctcctgcctcggccgccccagtagctgggactataggtgcgcacaactacacccggcattttcttgaattttaaaggggactgggacgccgaggcgggtggatcatgaggtcaggagattgagaccatcctggctaacacagtgaaaccccatctctactgaaaatacaaaaaaaaaaattagccgggtgtggtggcgggcgtctgtagtcccagctacttgggaggctgaagcaggagaatggtgtgaacccgggaggcagagcttgcagtgagccgagattgcgccacggcactccagccaggctaccctggctggacagagcgagactccatctcaaacaaaaacaaaaacaaaaaaagaattttaaaggggaaatagtccttctgaaggagtcattaaaattggagggaagcatgaacaagagcacacaggtgaggaagagtaggttgtgtgcagggaggcagttgggattgctaaagcataaaccataagagaaaaatgctgctggagaggctagatggggcccaatcattaagtatcttttgatctaggaggccatggggagccgctgatgggttttcatcaagagcagctttgcatttttgagaatatgaatctgagaggacaagaatgaaagcaggaaaaaccaggaagctattgcaatagcctaggcaagagatgctaatggccagtattgacattggtatcagggacatgaaggaggcaacaggtttaaaaaacccggaggtaactcaagtcagcagggctttatgtttggatatgagcgtcagggagagggtggtgccaaggatgatgcccacgtttctcacttggatgcccggatggatggaggtgacattcattgagacaggagaaaataggaggaggcacagaacttattcgacaaagttctttcttgaacctcttatatctgaggtgcctatgagacatgtcctggatccagcaaagagttatattagttcttcagtctatattgggatacagttgtgtgcagtgtcatagagagaggtctctgggctgaagatctggacatcattagcatagagttgatagctgaaatcacgagtcgatgatgtccctcaagaagaatacgccgaatgtgaagagctctaagcccagaaaagagcccaggagaagtgccacatttcaaaggtgggcagaggtcaggtgcagtggttcacgcctgtaatcccagcattttgggaggccgaggcgggcggatcacctgaggtcaggagttcaacaccagcctggccaacatggcgaaaccccgtctctactaaaaatacaaaaaattagtcgggcgtggtggagggtgcctgtaatcccagttactcaggaggctgaagccgaaacaggagaatcacttgaacccaggaggtggaggctacagtgagctgagattgtgcactccagcctaggtgagactctgtctcaaaaaaaaaaaaaaaaaaaaacaggccaggtgaggtggctcaagcttgtaatcctagcacttcgggaggccaaggcaggcagatcacctgagatcaggagtttgagatcagcctggcaaacatggtgaaaccccatctctactaaaactacaaaaattagctgggcatggtggtgggcgcctgtaatccaagctacttgggaggctgaggtagggagaatagcttgaacccagaggtggaggttgcagtgagccgagatcatgccactgcattccggtctgaccgacagagcgagactccatcacaaaaaaaaaaaaaaaaaaacaggtgggcagagaaatgaagtccctaaatggaccacagaagaagctgtcagggagaagagaagagaaccatgagcctgcttcattatggaggctgtggtaggccacccctaagaggtcccagtgacccctgcctcctgatactcatgtcctcgtgtggtgccctctgcttgaacgtgggctgaaccttttgacttttttaaatcattctatatttcatttcaaaagtgactcacttctcatgaatagaatgtggcaaaagtgatgggatattacttctgagattaggttataaaagactatggcctggtgcagtggctcatgcctataatcccggcactttcggagaccaaggcaggcagatcgcttgagctcaggagttcgagaccagcctgggcaacatagtgaaaccccgtctctaccaaaaatacaaaaaattagccaggcgtggtggtgcgtgcctgtggtcccagatactcaggaggctgaggtgggaggatcacctaagtctgggaggcagaggttgcagtgagctgaaacggtgccactgcactgcaacctgggtgacagagtgagaccttgtctccaaaaaaaaaaaaagaaaaaaagggccgggtgcagaggctcacgcctgtaatcccaacactttgggaggccgaggtgggtggatcacctgaggtcaggagtttgagaccagtatggccaacatggtgaaatcccatctctactaaaaatacaaaaattagccgggcgtggtggcagatgcctgtaatcccagctactcgggaggctgaggcaggagaattgcttgaacccaggaggcggaggttgcagtgagccgagattgcgccattgcactccagcctgggggacgagagagagttcatctcaaaaaaaaaaaaaaaaagaaagaaagtgaaagaaagacagagagagggagggaggaagggaagaaggaaagaagggagggaaggaggaaggaaggaagggagggagggagggaaggaaagggagagggaaagaaagagaaagaaagaaaaagagagaggaagaaaaaagaaagaaagggaaagagagagaaagaaagaaagaaagggagagaggaaggaagggaggaagagaagagaggaaggaaggaaggaaggaaggaaggaaggaaggaaggaaggaagggagttttgggttgatttaatatacagaagccaaggaaggaaagatttctaaaagagaggtactggtcgatggagttaaagctttagataaagatgaaaaatgtacttggatttggcaagagaaagtccttaacaagctcaatgtgagtggtttcagtgagttgtgactcaaatgcaaggtgaaggccggggctggtaagcaggaatggataccaatgtttctgcccacccagcatccatttcgccatcctctgtaatggctccctgacttttcactgagtaaccattacccacgtcctactggatatgcttccatgagactgttagggcactcagctgtccacaggccaaggggagtcatgggaggccacaagactcaagctgcaccagtcagaagctctccctggaatttgaatcatgagcttatgtgacaggaggcccaaatctgattgcagctgatttatgttgtacccagggccctgaggaagctgccattccttcctgctacttcaatccctgctactgccctggttctagtcttttctgaaggctgcttcttcagtctctccctctgttgtgagtgccatcttaatctccttctaataaatatctttcttgcttaagttagcaagagtcggtctctgttgctgcagccaaagaaccctaactcatacttgtcctttcaagaatttgggatgagatgaggaggacaatgaaggacaagcacgaggggagcatagcctggaggaaggtagaggtttttttgagtgcggcggggggagtttgttttgtttctttgtttttgagatactctgtcacctaggctggagtgcagtggtgggatcatggtagcctcaatctcccaggctccagcaatcctcctccctcagccccctgagtagctgggaccacaacaagtgcacaccaccatacttggctaatttttttttatttttagcagagacagggtctcactatgttgcccattctggtcttgaactcttggttcaagcaatcctcccgcctcagcctcccaaagtgctgggattacaggcgtaagccgctgcacctggtgagtttttttcttttagttagtttctaaggtggtagaaacatggatgtatctataggttaagaaggaagacagagaagagggaaggtgtggaaacagggaagggaagaaagatggagtaagagtcatgctgggagtcatgctgggatgagcaatacacaggtggagaggaggacaagaacagagcttgaagaagtgaaataaatatgggtgtggctacatgaagggttgtttcatttgtttaaaaaaatctttatatatatatgtgtgtatatatatgtataaaaacctatatatatatatatgtttgataacaagttgaaggaaatcatggtccatttgcctcaattttatttgttgagactgaaagggtagggttgtagggatgctcaagggagaagggtaagtgagagagggggctggctaagaagtttgagtgacacctatatgtgctactctgccaccatttttccctgagccaagttctaccacctggaccacagttagggatatgctggcaaatgaggcagaaggctgggggtataaggggctgggcacgatggctcacacctgtaatcccagcactctgtgaggccgaggcaggctgatcacttgaggtcaggaattcgagaccagcctggccaagatggtgaaagcctgtctctattaaaaatacaaaaattataaagattattagtatgaatgctgttactgagataaatgagcctatggatgagataatatttcatgcggtatatgtatcaggatagtcggagtaacgtcgaggcatacctggtaggccaaggaagttctgtgggataaaggttaaattaacacctatagatgtaacggtaaagtggattttagcataggtctggttaagtgtgtaacctgaaaaaatggggaatcagtggacacctgtgatcccagctacttgggaggctgaggcacaagaatcacgtgaacccaagaggtggaggttgtggtgagctgagatcgcgccattgcactccacactccaacctgggtgacagagcgagactcagtttcaaaaaaaaaaaaaaaaaaggctagggttgtaggattgtaagggaattgagagcatatgctggtcattttccatttgccctccaggtccaccctccattcttctctacccatatgggtggcatcatcggacccccccttgctctctgacttcaaattaggttcctccctaaaagaagcaccagcagggcatcagagaacagaaaaagaaagcattctggatacttcttctccaactcccagctctgtgtcagcaccttggttctgacagtggctgtgcccctccacaactccagctcctctcaggcatgttccatgactctcacagcactccagtaataccaatcctttcctcactccttcagacctaagggtggtcacagcttcctgctgccttcacctcccttgttggttacctcaaccctgcccacacctctgcaaagagtcccttcattaaattatcttcaaaatcccagctgtggtgccttctgtttcctgctgggaccttgactattagagagctagtgaaagagctcagatggtccaatatgagactctggctgggcaaggaagggagagaagccaggaggggtctggcagactggcagaaaacagagggatcaagggagtagagctctctttgagttgacgccacaggtgtgatggcagtgaggggctgtcagatctgaaaggcaggtgctgggatcagagagcaggatgctggattttgaactgggttgtggttaaaatcagggattttttatttggaactcagaaagtcatgtgttagaattccgactctgccattttactaaatgtgtcacccaggcaagtgactttaccttcctgagtgtatatcctcatctgtaaaatgaggatactaacaccagccttccaggtttgtgtcaggcgtaaacacatgtaaagcatttggcaaagtgcctggcatgtggtataagtgctctgtaaatgttcactatgtatgttacacttcctggtaatgactaaacccaaggtgtggtcatgggagtggatgactaaagtgggatgaaggtcaccagagatgaagtggaaagagactgtgaggctagatcattacgaggatggattatcagggacagttaaatatcccagcaggagagcatgggttggggtggagaggaagtctatgagcaggtgctagtcttcaggaacgaggtgaagtgaccagggagtcaacggatgtcaacagggaagtgggatagagggtggtggaacctgaggacataagcctcaaggaaatctgggtcctcagtccctcttacatccctttgagatgtccccagtgatcatgttccctactaagccagagtttatcaagggtggggttggatctaactcatcttgtagtacctaggacaggtgtttaagctggtaaatgcttgttgaatgacttggtgtttgagggaaacagaaaagtctacctctgcatcgtatttacccttggtaataataattcttcttattttaagtaacctaatgcttcttttaaacctcttattcaatttaaacaaatatttcctgagaccttcatacatgctattccatctacctggaataccctcacccactctatacactcaaagacctcctactcctcattcaagaaagagcagaatttaattattaggaagaagaaaagtaaaccacaatgataaactgctacacatccatcagatcagcaaaattaaagcatctgacaacacatagtattggtgacaatgtgaagcaaagagagctctcattcagtgctggtgggagagtaaactggtactgacacttcagaaaaatagttggagagtgtagtgtgcagaaaaatttcctgcaaaagccaggcgcggtggctcacgcctgtaatcccagcactttgggaggctgaggcgggcggatcacgaagtcaggagatcaagactatcctggctaacacggtgaaatcccgtctctactaaaaatacaaaaaaaaaaaaatagccgggcgtggtggtgggcgactgtagtcccagctactagggaggctgaggcgggagaatggcgggaggcggagcttgcagtgagccaagatcgggccactgcactgcaacctgggcgacagaacgagactccgtctcaaaaaaaaaaaaaaaaaaagaggaaagaaaaatttcctgcgaaagatgtccagactgaagctctggaacctgtgaatgttaccttaaatggcaaaaaggactttgcagatgtaattaaagattgtgaaatgaagagattatcctggattatttgggtgggcccttaaagcaatcacatatacccttctaagagggaggcagaggaagatttgacacagacagaagaggagaaggcaccacagaagcagagattggagtgatgctgccacaagccaagggatggtggtggctaccagaagctgagataggcaaggaacacattctcccctaagcctcaggagggagtgcagtcctgctggcaccttaatttcagtctagtggaactggttttagatttctggcttcctgaactgtgagaaaatacatttatattgtgttaagccagcacgtttatggtaatttgttatagcagttacaagaaacagtatagacagccaaacccatgcatacgcatacctatgtccagcaattctatttccaggtatatccctatagaaacataagcatttgttcaccaaaaaccatgcacaagaatgttcatagcagcattattcataatagcctccaactggaaacaacccaaatgtccatcaaaaggtcagtgcatgaactcattgtgtatattcatacaatggagtaccatgatacgccaataaaaatgagtcaactacagataagcagaatatagaagaatctcacaaacacaacgctgggtaaaggaaaccagacacaacagcaaacatatggtatgattccatttatattatgttcaagaagagataaaattaactctatcactgagtgatgaaaaactagaaaattgaagaaaagcaaggcggtggctcatgcctgtaatcccagcactttaggaggctgaggcggatcgcttgagcccaggagttcaagaccagcctgggcaacatagtgagaccccgtctctacaaaaaaaataataataataagccaggtgtggtggtgcatgcctgtagtcccagctactcaagaggctgaggtggattgcttgagcccaggagtttgaggttacaatgagttgtgatcgtgccactgcactccattctgggtaacagagcaagaccctgttgaaagaagcaaaagaaaaagagaaagaggaagaaagaaatgaaggaagaaagtgagggagagaggaaggaaggaagggaggaagaaagaaaggaagagatcgggtgccgtggctcatgcctgtaatcccagcactttgggaggccgaggctggcggatcacctgagatcaggagttcgagaccagcctggccaacatggtgaaaccccacctctactaaaaatataaaaattagccgagtatggtggcacatgcctgtaatcccaactgccagggaggctgaagcagaaggatctcttgaacctgggaggtggaggttacagtgagccgaaatcacgccactgaagtccagcctgggcaacagagtgagactctgtctcaaaaaaaaaaaaaaaaaaaaaaaaaaaagacaggaaggggagggagggaggaagaaggaagaaaggcagaaagggagaaagggaggaagggagggagggaaggtggaaagaaggaaaaaaggaaggaaggaagaaagggagggagggaaggaggaaggaagggaaggaggaaagaaagtgagggaaggaagggaaggaaatgaaggaggggggagggagggagaaagagagggagggaggaagggagggagagagggagggagggaggaacgaagggagggagggaggaaggaagggagggagggagggaggaaggaagggagggaggaagggaggaaggaagggagggagggagggaggaacgaagagagggaggaacgaagggagggagggagggaaagaagggagggggaatggagggagggatgagagcatgacagaaaggtgggcaggtggctccctgatatcccccagcgtccctgctgttaacgttatttcttggcaagagtaacacaggaaaggagggaggtttcctccttcatttccttcccttccttccctccctctttttcttttttttttttttttttttgagacggagtctcattctgtcgcccaggctggagtgcagtggcgcaatctcggctcacggcaagctccgcctcccgggttcacgccattctcctgcctcagcctccccagtacctggaactacaggcgcccgccaccacaccaggctaattttttgtatttttagtagagaaggggtttcccagtattacctaggatggtcttgatctcctgacttcgtgatccacctgcctcagcctctcaaagtgctaggattacaggcatgagccaccgcgcctggccccctccctccctttcttccctccctcccttcctctttccctccctccctttcttccttccttcgttccttttttccttccttccaccaccttccctccctccctcccttcctccctttctgcctttcttcctccctccctccccttcctgtcttttttttttttctgagacagagtctcattctgttgcccaggctggacttcagtggcgtgatttcggctcactgcaacctccacctcccaggttcaagagatccttctgcttcagcctccctggcagttgggattacaggcatgtgccaccatactcggctaatttttatatttttagtagagacggggtttcaccatgttggccaggctggtctcgaactcctgacctcaggtaatatgaacagttcgtttctgtcctgcacttttcagaatgttatttcacaactaaacgtatctgggcggtggcggtggtgattcgtagcagaaagcacagggagcttcccggtgcccccagcgtcccctgggctccgacccgctgtgtccacatcatcacaggtgccctccagagccagcacccaggccacagtcccctcaaggacctgtgggccatttgctgggcctgtctcacatgatctccttgtgtgtaactgtcgggttccaggcctgtgtccccacctgtgcctgctccccacgcggaaaaacatggggacaatggctgctgaccctcgaatgggtggtggcggcacgttctcacttacctctgactctgtccgtcttactacatcccattcaggcacgtcccgaggccttcgcaagggctgaaaaattccagcaaaggctgtcccctgcccagaataccccgtcactctgttgaactcctcctcagcccgcacaggccaacccaaggttccgctcctccgtggggccacgccggcctcccacatctcccatgggctccgatctcctgtggccccacgccctgtccccacacgatcctgtttctctacccgatgctcccagggttgtcctccgggctcagatctgacccacctccgggccccgagggtcagtccctcaccccccgcgcctcgcccgcactcttgactagctcaagggagctccacggcgcatgcgctcagggaggctctggaggcgcgagcctctgcctcatggttcccgccaagtgcactgcgccagcgcagatcccttcagcctcaaggttggccctcctgacttctggcaagcacgtgctggccagaggcacgtctggggctgaacagggttaagggggaggtgacccagagaatggggtggggccaatgacatggaacggaagcaggggcagagcctgaaatgtgtccagccttgaggtgggacccgtattcaaatgaggccaggagacaagccaggggctaggggctcaagggaatggcaggtcctagaatttagcccagtaattgggagcccaaacacaggtaaccccacctagaggagagcctcagccttaggtcatgaaaatggaagggtcagggcaagggagtggaattccccacctcattccccacctaactgctgtcactaaggtactctccatctcaatgctcccaccactcaggtaaatcacctgccctctctcagtccatttcacatcaaacatgggtttaaaatcccacagtgtggctgggggctaaatagatcttgagtaggtgtccagtggaactcagcttcctcccagagagggtcaaggcagaacctgggatcacacagcagctggctccaccaggccttggctgctggataggactcacgactagactttgccactcccctcctgcacatcaagacgggtcgaaattccagaacaggctccaaggtgtgggcaggggcacccatccctgcaagaaaggcagccttggaaatccctgccaccctacccccactccccacccctgaggaaggaaaaccctgaatattgagtaagagaaacgagttcctgagcccttacatgaggggtgggggaagggcaggaggccacaacctcagctggagccacagaacagcaggaggaagtgtttggcctcagaaagaacagagatccaggtgaagagaaggttaatgtccaggtgtgaccagtggggagccacgtggagacaaattccaggcagagaacctctggctgcctatcttttcattttccaaagcttaggcgcttcatcagccttgggtgtagctggcccacctcactgaacaaattaaaaatcctgggagtggccgggtgcagcagctcacgcctgtaatcccagcgctttgggaggctgaggcgggcggatcacaaggtcgggagatcgagaccatcctggctaacatggtgaaaccccgtctctactaaaaatacaaaaaattacccgggcgtggtggcgggcacctgtagtcccagctactcgggaggctgaggcaggagaatggcgtgaacctgggaggcggagcttgcagtgagctgagatcatgccactgcactccagcctgggcaacagagcaagactccgtctcaaaaaaaaaaaaaaaaaaaaattcctgggagcccccaaggacatacaggagcaaagcatgtgtgaacatggttggaagggtttctgactccgaggcagtattctatttcttcctttgacagaggacaagactgacacccagaggggaggacaagcgtgtggttatcagctggcatatggtccagcatcctgcccacactccagtccctaacgctgggccaggaacactcctcctcccagcccactgaggtccaaaagctgggcatggtgacgggcacctgtagtcccagctacttgggaggctgaggcaggaggatcgcttgagcccaggaatttgaggctggcctgggcaacatatcaagaccctcaactctaaaaaaaaaatttaaattaaataataaataaagagtcctagagaggccgatgcccacctatgccctttccagggcagtttaattggtatcatttgtaaaaggtcttttccatcacccccaaagcctttgcattccctttccaagaaggtggctgtttactggttttggccccatgtgcaacagtaggccttggtatgatgctgccataacactcccatgtgacactccaggtgacatccaagtgcaagtctatgttcagctctggacagcaggggggaaggtgaggagagtcaggtctgtaaattgaagctgggcagggccctggctggctggagatgtgtgggcaaggtgagcaggccccatgtgcaccccagctccagtgcccactgatgtggctgaagcccaggttggttgtggtcaaattagaggtcctgagagagaagcccttaggccaaagaagtgtgtgctgggaagcaggccagggcagaggcccagggaagatctcagcaggggcagtgtgagcatgagcgagtgtgtgcacctgtgacagtgcagacagcccaagatcagagatacaatgtgcaggggggcctttggtgagtgtgtagctgtgcccctcccttctgagatacaggcccagcccccgcctccggaggctaagggggcacacctgggggtaggaggagtctgggaaggaaactcagctggaaatggtttaggcctcagagcccacatcctgtgggaggggctgtcaaggggcctgctgtcccggtcctgtcgcagtcctcaaagatgctagagtgacagtcctctaggggtagagatggtcgtcctcccaggagaaggtggcccggagacttggaggtgggatcaatcctgccagtcctggatcaggaggcctctgtcgggcgccgccccccttcctcctccatcagcaacaggcggcgccggccagcctcatagtcagcctcatccacactgaccagcaggcgaacagcctcccggcccacagcctctcgcagggcctcagtcaggaacacgccccgcagggcctgcagcagggcgccactcaggtagtcgccccagaaggcgtccagataggagagctctgagaacttgatgtcacaaaccacagagcccaggtcccttgagcgcagcactgcggtggcctgcccaaacacgtccagctgccgcgccagcgcctggggccgccgggatgccacgccctgctccaaggctggcccatgctcgcagtactctgctcgaacccggagccggatgtctgcaggggaaggagggatttgtcagggagggggccaacactagacacacttatggggaacgccacccttcctccctccagccttctccctccacccccttccggtagccacaccctagtcctgacacagcctccccggctctgtggggttccctgaccaagtacgtcctcctcttctccagcccaccacctcctcactgctccaacaagcctccccaccgccaggggtgctctttccctggatctgcacaacacttgctccctctcttcctgcaggtctttgctcaaaagccaccttgccaacaaggcccacctaggccaacctatttacagctgtaaccacccacccagccctctctgcagcatgccaggtcccacaccctgctccatttttgtccaaggcacttatcaccttccaacctcctctgtcagttactatctgctcattatctgtctctacactcagcatggagagacagatgacagcaaggaaggggtttttgtctgttttgttcacttgtgtaactgtggcacatagtaggtgttcaatatgtatttgtgaagaactaatgcatgaactaatggacttgccttaaggcaaccagcctcacaccctgcccccaaacaatgagattcacatggtgccaaccacatccccatccctcccatccacctgagccagcactgcggatgcgcagggtcctgaccaggcccgggaggcttgcggctggacctgtgctggctctactgggagtcaggtactctcttgccacagagctgctaagatgatgggttggaagcccagagctgctgggagccactgtgccaagaggagagaaggaagcctacgcagggccagccccagagataaaaagattcctgaggtcatcacatgagcccacgatcgtagctggattttcagctacactcaactcccctttttgctgaagccagtttgagtcggtttctgtcacaactctccccacatctgcgcaaaagaggtggcagctgtgtacaggggacaggacactggacttctaaggctatcctgtaatcatgaacttcacataccacctctcttccagaatttctgaattcccacccatcacttaggctagtgacagtaccccctctctctacacacccaacgaggctgtcctgaggatcagctgtgagccagaaacagcagcagccaacacttacagagtgccgactatctgccaggcgccaagtgcttgaatcacagaaactcatttaacctataaatgaccctgtgggacaggtcctattatcacccccaacttacagatgaaaaaatggaggccaagagaagtgaagtgacttgcccaaggtcacacggccagacaatggcagtgcctgacagaggtcatttaacctcctatgtccctgagagaaggctcctcaatcaatgaagtggattcccacacaggagccttcagcagtgtgacctgtgacaagtcacaacctctctgagcatgggttcctgcctaaacaaggggacaattcctactgtgaggagctgttaagaggattaaaaagagagcaatggatagaaaggaacaagctagcactgcacacagtgtccaaggggtgctcccagaatggcagccaccaacccctctgataggccaattgcctgacccttggggatgcagtagaatcagccctgtggggcagaggccaccttcagcccacttgacagatgaggaaacaaggctctgggagggaatgtctcatgctgtggctcccttcaactttcacagaccatgtcagccacagagcagaaaggagaatgcagggcccctgctccccaagacaacttcacagccctgcccacttcctccttccaccccaaacccttcctctttctggctctaggggaaccccatcctctccacccaacgcccagggaagcctgcccagcctcagcccccaggccctcccatggcattcagacccagctgtctctacccagacgaccagatccttgactgcatccttgactccagtaagcaactggccatgacctcaatcaatgtgggtgggagagcagggggctgggaggagcagcacctcttccaggccacccaggagtggttggccacagaggcagggccaggtggcggagtccaacagaccttgaggtgagtcccagctctgccactctctaagctgtggggccttgggcatgtgaccttacctctctgagcctgtttccccatctgaaacacaaacaaacaagaggtccctgctgcacattgaagtcacaaggattaaatgaggcaactcataaaatgcttgcttacagccctacgacaaagaaggctcccagaaacaggaactgtaatttcgacacccaactccctacacccatggccctcacccaggccttcatctctctctcacgggtccctaagccaacctcctccttggactcctccagtccctgccgtgtccccccataccctgcactccagtcacaagaaaatgttcccaacaagagccttacttacaaaatgacctgtccacctcctccatccagaacatttgccaaggctcagctcgtgggagccccacatcctgcccagttgaatcctctctcagctcgtccttctccccagcatggacctctggtataagttctcaatccacccagagcccccaccatgtcagagtggacaggtcacagggacaaggccagagcaatctccatgcccccattcaatctcttattcaacagatattttatgaatgccaggcatgctagggtgacacaagaaccttgccacaagtgggacggggagacatgtaacccacagttaggaagcactccccacaagccaggctctactcaagggctttcctctctcagcccacctaatcctcagagtactttcaccagccccatttacagatgagcaaatccttcagcagaccacacactcccacctctgagctggaaaacatgatcatggtgcacagggaaaagacagggaggtgccaccaggcaataggagcaggcgaggcttctctgagcctctgctccacccttagcacccaatcacgtgctttacccctccccaaaataatcacaacaggtgacacctgcctatagcttttactacaggctggcacggtactacatacttcacatctgctgacccctttgattgtccccacaacaatcaggtgatgctgttattattccctttctgcagatggggaaattgaggcacacaggttgagtcacctgcctaaggccaccagataggaaatggcagagctggaattttacctcacgtgtatggctccagtgcccgagctcttaactacccctatcctgttggctacctcacacagaaccatacacatcaaatacacaactaaaagacatcctgagagccagcagagaaaattagacagggcgagttatagttcagattgaaaggatcagagaggatctctctaggaaatgacatctgaagtaaaatgtgaaggaggacaagtaggtttagaaagaaaaacaggagagaaaaaaagaatggcattctcaggagagatgagcatttatggaagtccagagagaaaatgaacttcaggcctgcacaggctgaggggccggcgtggcaggaacgtggaggggagaagggcgctaagggagaacgggcagccaggtcagggaggctgatctcaatcccaatcgccagcagactcaagattctagggcctctggaagtgaccacacctctctgtacctcggtggcctcctgtgtaaaacaaggctccccctaacatccgcccatgtggggttactgtgagaattcaaggctcaatgcaaggaaagaggggaggccaggaaggccaggcatgcagagaggacaggaggcaggacctgccaacttaggggcaactccagctgtgctgtgaagtggcaggtgggtagaaacagggccagggcagcaggcaggggaagggtcacaaatggctgtccaggatgggagcagtagacatggagagaagtggaggaactgtccagtgtggccctgaggtggcaggcaggaagagcacccagcaccatgtgcgctggaccgtgggctggctgcatcttttccattttggcagctgtggggaaaagttccctgtccctgggagggtggggggcaggtgccatgccttcctagagaggagagctgctcctgcttcctgcactcaggtgggcccagcaccctcttgtcccccacccccacctcaccagtctctcttctggggcaaatgggacatcaagtgaaatgggcttctcagtgggggaccagggtgaagttcaagggagcaggccctgggctgggtgtgtctgggagcccagagatgaacctcactcaagtcgtctctctaagagttcctagttgggtggtgataaggtttggatgtatgttctctccaaatctcatgtggaaatgtgactccaacattgtaggtggaacctcatggaaggtgttggatcatggggctgggtccctcatgaatcccttggtgatgagtgagttcttgctctggtatttcccgtgagagctggttaagagtgtggcagctcccccaccccccaactctcaccatgtgacaagcctgctccccttggccttccaccatgaatggaagcttccggaggtcctcaacagaagcagatgctggcaccctgcttcttgtacagcctgcagaaccgtgagccaagtaaatctcttttctttacaaattacacagtctcaggtatttctttatagcaacacaaaaatgaactaacaaagatgggctggggaagaagaggacctgtgctcccacaacactgggagatgcttccggccttgctggagagaggcagccaaggtgcttcagtggagagaccccacccccgccccgcccccacaccaggaccagcaccagccccctctggacaatggtgggaaccctcccagcatcttggcttgcctccctcgtctcttctccacaacaaagccagcatcatcatgtcaaatggaaagtttttcaactcctactgagttcaactcctactgaattgaggcaatgaggagaagctgcctccaactccagagagggataagcagccatcacctgcttcctgatggaggcgcacaacacaccctcagaagcgggattgaggaaaacaaaacatcaaaccagaatctgatcaagcctctccagaccccactacccatcttcaggaaatacaaaagacagggtagaacacactgaatcaaccctactgcaggatacagtcagcaaaatccagtcttcgggaaatgccacaggacaactgctttagaaaaatacaacgcaaggcggagaaagagagatggtaggggaaaggagagacttcagagaacctacatttataaaacaactgaaaatctgagcaccgatcagatatttgatagtaaggagttactaatcttttttggcgtgaaaccctatttttatctttggccagccacagtggctcacacctgtaatcccaacactttgggaggcccaggcgggtggatcacctgaggtcgggagttcgagaccagcctgaccaacatggagaaaccctgtctattaaaaatacaaaattagccgggtgtggtagcacatgcctgtaatcctagctactcgggaggctgaggcaggagaatcgcttcaacccgggaggcagaggttgcggtaggctgagatcacgtcattgcactccagcctgggcaacaacagcaaaactccatctcaaaaaaaaaaatctcttttcaagatacacagtgaaacatctacagatgagatcatagggcaaccagaattgactccaaaattcctaattatcctaagatgagatcagccatgagttgacaatggctaaagctagtctatctactttggtgtattttccatagaaaaaattgcaggggccaggcggtggctcatgcctgtaatcccagcactttgggaggccaaggcaggtgaatcgctttgagctcaggagttcgagaccagcctgggcaacagggcaagatcctgcctctaaaaaaacacacagaaattagccaggcatgctggatcacgcttgtagttccagctactcaggaggctgaggttggagaatcacttgacctgggaagcggaggctgcagtgagctgagactgcgccactgtgctccagcctgggcgacggagaccctgtctcataatttaaaaaaaaaaaaaaaaattgcaggggagaagcaaagctgatcctgtcattcaaatcctccaactgctttccataataaaaaaaaaaaaaatgcaaagcccaggccctgcaggatctgccctggttccctctcccgccctcacctcctaggggtctccaccctactcctccattcctgtcagtttccttgccatcctccacgctgcccttgagcactggcacatcccacttgggcctgtgctcccgctgtcctctccatcgggaacacccttcccctgacatctgaaatctctctcttggctttctcccaccacagcacaagctcaatgagggcaaggtctcccaccccggctgacctagcatatagtaaataccctataaatacatatggaataaacaaataaacaaacccaagtttcagccaagctctgccccctgccactcagactagtgaccgcctttccctgatcgtgcctcttcctttgcaagatgtcatcccacctcaatggctgtcttgagaattcagggccgagtagtgcccaccacagaccctgagaggcacatggtcgctcagatgtcctgtgtccaaccctaggaccaccaaggtgtccttcctcactgtctcaggcagtcgagagtttgtctagttctatccctcaatggagggcagctggctgggggtcacaggtatcacaggtgaggaagagtcaagaatagcaggcctcttcttcagtcaggcctccttccacctctggcattcggcctctctaaaaagtaagccattccatttttcagagggaaaaacaggagcccagatggggagagcctcactccagccccaccctgcctggtgagtcagcagtcagacctgctcacccatctcccatcaagacctagccaagccctggttaacgacctcctcgcctcgggaaagagacctgaagcctcccttggcctgttcctatcttccttgaggcaatgactccctcacctgcccagccagcctggtggctctgggaattactggctgattcgagggggagtcaccaccaggcaaccaccccctcaaaccctgccgcgcaagcccacatagctgcctgaggacccagggctggctctctaggtctgttccttctgacagcacccagcacaggttatctgctgcctcatctacaaagcaggcatgatgcccactccctggagggccattatgggcactaggagggggcaggtgcgcgtgctttgtgggctggagaaagctctgcagatggtagaaggaagcacccccaggccaaggtctcctagaagacaggacatgccagcatctcaccagctccaacttggtcttctgacctccagcttccacaatggcctcctcccctgaacccttccactccccccaggggcctcctcccctccctcagcagcctcagccctttgcaggggctcggcaccacccctggcctcatgtttcattagggcacttgtcactagctgatgccgtctgctacgctggcttattttcgagttatctgtcttgcccactataacgtaaactcctggaggctgaggactttcttcacctggtccaattctgagccctccgtgcctggaacagtgcttggcataaagatgatcctaataaaaactggatgaaggaattaacaaacccttccatggctccctcacccaccaccccctagaataaaatccaaaccaaggccccccacctgcctcatctccccctgctcccacccacaaagcctctgctccagacagactcagccctgaccacatccggctggggacgttgtacgcatgagtcactctgccagaatcacccttcccagctcctcttccagcttccttgagcttgttctagacatggcacctccacaaggaaactggggctggccaggagactccctgcacaccccagagcccctgcactcacaatacccgtgccacctgtcacatcagcctggctgccacttccctcatctgtcttccctgcagcctgagagctcgaagaccatatctgatcccttctgtgtttcccaagcttgcccaactagagaaaggagtactacagttgaggcggtgctcattgctgtgtcctccccacatgaccaagtggaatttctcaagagcaaggtcaaagtagtctcacagcagagtccccaacccacccaacccatcgtgtctacagtcagccctatggccagtgcccttccttatttcctaggtcacttctcctcaccctctccaacacgacccccaggccagacctctgcctagtccttctccacagacctcacagcctcttcaagcgattaatttaatctacgtaacacatgcctagcagagcacctactagaagcccagtgcatcctaaacactttgaaaaccctaacttgcttattaactgattttccagatggagttagagttccctgaagaggaatcacatcacgtcaccctcctgctcaaaacccactgccagtgcctggcgcatggaataaaatccaaactgtcatccctgccgtggcccgcgaggccaagctgctccggccccagcctggctcctccacctgctcccaccctctcttggtggcacttatcattgtctaaaatgatcttcagtttcactggtcacctgactaggtcagctccacaagagccgggaaccttgctgcagcactcctgccccaggcacactgcacagcaacagtgagaacaaaccctcgtacagcgtgtgccgggttgggcactgctccaggcatactgtgggtaaatttgttttctcacaacaatccaaacagggaggtgattatcagcctcactttacagatgtggaaactgaggtggatggctgggtgcggtggctcacgcctgtaatcccagaactttggaaggctgaggcgggtggatcacttgaggtcaggagttcaagaccagcctggccaacatagtgaaacccatctctactaactaaaaatacaaaaattagctgggcgtggcagtgggtgccagtaatcccagctacttgggaggctgaggcaggagaactgcttgaacccaggaggcggaggttgcagtaagccaagatcacaccactgcactccagcctgagagacagagggagatggcgtctcaaaaaaaaaagaaaagaaaagaaacgaaactgaggcagagaggttcaattactggcctgaggtcagacaacttatttaagtgccaagaccaggatgtaaatcaggcagcctgatccaggatcgttgtttttttaccccgtgatatgctgccactgcacaagaaatgtctgaataagtaaaccccggcagatgtttgctgaatacacaaatgaaactagggcagggggttgtcaggaaaggcttcctgaaggaggtggcacaagatctgatccttcaacaatggacaggatgtagacaggcaagatggcgagagaaaggacaagaattccactgtggtgaacgagagctgacacccatctgccaagtgtgtcacatcccccagaaaaatgctcatttctcccaccctctgaacccacccggggcactctacatgcattgccaaagcctacagacacctaccacaggtcactttgccttcagaggaaggtctggcgggctctgactgctgctggggtgcggctggggcccctctccgccgccgtctggcaccaccactgggccggccccgactccgccgctgccgcttggttgggggggagcctgaggggaaaaaaatggggcaagttgaggaccaggatgacagctagagtgcccaggtgtatgcctggaaaagaactcaaggtgttctcggtgctgagaccctgagtgagccagtctgcctcccttcttcagtggccctgtctaaaagatgaagagtaccatctagcatcatctagaagggcaaatgagtacaccccagcacgctgcagcaggctcactccaggtgtgatgtgaccctagagaaatccctgcacacttacaccaggagacacacacgacaaccgccaccagggcattgtttatcatgatgaaaacctgagaacaacatatctggcaagaagaaacaggaatatagggagatgtccaggatagactgtttaaggaaataaagcaagatacaaaataagtgtctacagtgtgctgtactttgcataaggagggaaattaagattatatatatctgcaaaatgaaacactagaagcacagactagaaatgaatgaattgggggtgaggggcacccagcagtagaaatgacatgtctaaaaatacttttcatacttttttttttgagaccgagtttcgctcttgttgctcaggctggagtgcaatggcacaatcttggctcactgcaatctccgcctcccgggttcaagcaattctcctgcctcaggttcccaagtaaccgggattacaggtgtctgccacgacaaccggctaattttttgtattttaagtagagatgggtttcaccatgttggccaggctggtctcaaactcctgacctcaagtgatccacccgcctcggcctcccaaagtgctgggattatgggcattgagtcaccaagcccagccccacactttagttttgacttttgactcatataactgatttacacacttaaaaagttaaaatgaaataaaccataaaattaacacaaataggccgcacacggtgtggctcccgcctacaatcccagcacttttggaaggccgaggtgggtggatcacttgagatcaggagttcgagaccagtttgaccaacatggttgaaaccctgtctctactaaaaatacaaaaatcagctgggcgtggtggcgcctacctgtaatcccagctactggggaagctgaggcaggagaattgcttgaacccaggagctggaggctgcagtgagccgagattgtgccactgcactccagccagggtgacagtgtgagaccctgtctcaaaaaaaaaaaaaaaaaaaaattaaacacaaacagaagaaaatgaacctggtcggatgttgtggttcatgtctgtaatcccagcctacgccctaggagttcaagaccaacctggaacccgggcaacatggaaaaacccgtctctattaaaataaaatgtaaaaaaattagccgggtgtggtagcacgtgcctgtagtcccagctacttgggaggctgaggtgggagggctgcttgagcccaggagatctaggctgcagtaagcagtgtttgcgccactggactccagcctgggaaacagagctagaccctcaaagggagaagggagaagaaaaggaaggaaggaagggagagagggacggagggagggagggagggagggaaggaggaagagagggagggaggaagggagggaggggattgtatacataattggtaacaggaatactcagatgaaacaattattcaagtaacttgaagaacattctgactgtaaaatctcaatgggatatgctcagagaacaagaaacacaaataaaatctatgtttcattcactagatacagtcagcagttgtactgactttgttattttgatgctatttaattactgttgtaaaataaatcaaacaaacccacatcttaatgttattaagaggaaagacttttagtataaaaaagtctggctggggctgggtgcagtggctaacacctataatcccagcattctgggaggccgaggcgggcggatcacctcaagtcgggagttcgagaccagcctgaccaacatggagaaaccctgtctccactaaaaatacaaaattagtcgggcgtggtggcacatgcctgtaatcccagctactcaggaggctgaggcaggagaatcgcttgaacccgggaggcggaggttgcggtgagccgagattgtgccattgcactccagcctgggcaacaagagtgaaactctttctcaataataataataataataataataaattaattaattaaaaagtctggctgggagcagtggctcacacctataatcccagcactttgggaggccaaggcaagcaggtcacctgaggtcaggagttcgagactagcctggccaacatggtgaaactgcgtccctactaaaaatacaaaaatcagctggatatggtggtgtgtacctgtagtccccgctactcaggaggctgaggcaggaggatcacttaaacctgggaggcagaggttgcagtgagctgagatggcgccactgtactccagcctgggtgacagagtgagactccatctcaaaaaaaagtatttgtgatgtttttgtttctttgtttagagtggggatctcgttctgttgcccgggctggagtccagtggcatgccaccacacccggctcgttttttttttttctctgagacagggtcttgctctgtcacccagactggagtgcagtggcatgatctcagctcactgcaacctccaccttcccaactcaagcaatcctcctacctcagcctcctgaatagctgggactacacgtgcacatcaccatgccaggctaatttttatattttttatagagacagggttttgccatgttgcccaggctggtctcaaatgcctgggctgaagcagtccacccgccttagcctcccaaactgctggggctacaggtgtgagccactgcacccggctaggttttttatctttttagacacagggtcttactatattgcccaggctgatctcgaactcctggcctcaggcaatcctcctgcctcagccacacaaagcactaagattacaggcatgagccaccaaacatggctataacattaatctttaaaatactaacagaaactttttgaaaagtcaagtctctaacactgttcactgaaagaacctagaacaatatacacactcaacacccaggttttggtctctaaataccacagcttccttgaaaaacagctgattctagggtgcggaagggaaagttcaaagtcagcccaggacatcttgcagtgccacaaagcaggaagcacacaaagaatgatacaaacacatgaagaagacacaagaggctagccagttggaactgcaggaagactgactgactgtaacaagtcagtaaatagtgtatgggtctatagtgacactcaaactcaaaggggcattgggggaatacctcttgaaagagaaagaaaaaagaaaaagaattagaaaaatcaccattttgcaaacaccaatgtgataactggttcaggcaaagctcatagatgtgaaacccactgagtaaatggctattagggaacaggatatgccaaagtatcaccccatagactgtttactaaccatgagaactaaatgtcccttcacaatggacaaacatggcagatatccccttaaccaagtgaccaaactttcccacatcggaaaagccaggccgtacatgcctggagatgtactccaatatgaactagatggcagcaaccaaggattattcctgctaaagatgtataaactgaatctaaccaagcctcagacacaattcccatttaacaaaaaatgtaagggaaagagggacgagttacataactccatcaggaaaaaaacagacagataaagaaacaatcaggacattctacaaaacaaccggcctgctagggtgaaaaaatcaatgttacaggaaaaagaaaaaggtatggggtgtaggggcagtttctgtgctatagcaggagacataacaactgaatgcataccaactcaactatgaatagattctgaacggtcccacagtctggggatttttgaaaatggaccattagaatgtcagagaattcgtgtttattttcttaggtataatagtcttaaagtggtacaggagaatatccttattctccacggatgcctaatttaggggtaaagcatcctgatgtctgtaatttactttcaaagggttcaacaaaaaaatccagaattacgtatacacataaagcaaaagtagcaaaatcttaacaattattgaacctaagtggaagatgttaactgtactaatctttcaacttgtatgtttgaaatttcacataataaaaagaggggtggccagggcgcagtggctcaagcctgtaatcccaacactttcggaggcccaggtgggcagatctcttgaggccaggagttcgagaccagcttgggcaacatggtgaaacctcatctctactaaaaatacaaaaaaattagccaggcatggtgtcatgcgcctgtagttccagctacttgggaggctgaggcaggagaattgcttgaatctgggtggcagaggttgcagtgagccgagattgcaccactgcaccgaagcctgagtgacagaatgagattctgcctcaaaacaacaacaacaactagaggtggctggcatgatggctcatgcctgtaatccagcactttgggaggctgaggtgggaggactgcttgaggctaggagttcaagaccagcctggacaacaagggggagaccacacctctataaaggatgaaaaaattagccaggcatggtggcatacccctgtagttctagttacttgagaggctgaggtggaaggacagcttgagcccaggagttcaaggccgcagagagctatgatttcatcactgcactccagcctgggtgacagaccaagcccctatcttgaaaaagccaaacagaaaaaaacaaaaactgggggtggtgagaataaataagttaattggggcatggcaattaaaataatacaattagagatactcagcatgaataaatctcagacacatctagcaaagacagccaggtgcagagtaatacccacaatgtaatgccatttaaacgaaacacgaaactatgtgcaacaattctgtatgttgcttcagaacagagtatctgtagcaataaacacacacacacacacacacacacacacacagtgaaaatgagacagaataacccctcaggccccttccttgatgggcacaattcataaggaaaagagggatgctgccattacacccacccagctgggctcacctgtctcccactgaccctgctgagaatttgcagaactgcttgactgccgacggcgacggcagctaccctctgtcctctttgaagagctggaggtgccatagctatagcgttctggagacactggaggaagagaagaacaggaagaagcattcagcctcctggccctaattcccacccctggaagaatgcctgcaccacgaggtgcctaagttccccagtagtcagagcccaaatacccactcattctcaaacacctcctgcagaggttgctcagatgcctcctaagagagagaacttatcacgacttggggcaatctaacccacgtctacggcagctcaaactgtcaaggttattctgttgatagtcatggtaagggtccctgtaatggccctttgccctggcatcaactgcccccagctctccccaaggagtaagcaggcctctgtgcaggctccccaaatcttctcttctagagcgtgatcttcagacatagatatccaaaaatgctgtcagctcttccctagagctgtccttctcctgcttatctaaatcctgtgggcttactctgggtcagggaaggccataatcccccctccccaaactagccactgcccctttagtaacccagacaaaggcttggtctattcatgcacacggctaccggcagcctgaacccctcccagcttctcatgtgaaggctgctatcctccaggagcacttccttcacaaggattaagggcatcaactctggggacaagttggctaggtttgaatcctggctcccacacttcccagctacgttctctgcaagccccttcatgacataacttcttacctccctctcttccctagcttgggtcccctctgctcctgccacactggcctctgatgatgccaaactcattcccacctcaggccttggatgctccctgggattttctcccctggggtctatgcatggctggcagtgcagcctcagggcaaagcctcccttcaccttgctgctctcctgactctctctattccattacttttagtcttcctacaacagcgtctaaaaataagttctcttattatctgattgcccccactaaacttaaacttcatggaacaaacaccttgtcagctccatcatcctgtatccctcctaggcccagcaaacaggattgttattatacgtgcaaactgcttaacttctctgaacttgttattttcttggttacagtgaagacagtaacaggacttccttgtgagattactgggagactataaggcactagttcatatgaagggctgacagctgtgcctggcatgaaacaagccctccgtaaacagtggccaaaatcatcatcactgatgtggccaaattcccaaagccatgctttcttcctcttatgttgctcattgatattgtgggaagagagagtagcagaatgggacataagctgcctgatatggcactgtccgtatcagggcaccagggaggcccagcgggagccaggccctttcctcccaggaagtgtgacaccctcccattcaaccgtacctggccggcgccgcttgcgcgccaggtgcggcagcaggtcgtggcgggccagcacgcgcaggagttgccccagcagccgcaggttgctctcgtcgcactgcccgcggcgctccagctccagcaggagctctaggccgctgcgggcccgggctaagcctccggcggcgccaggagcctcatccagcagaaaggccaggagctccagctcgcactcggtcagttgcccgcccaccacctcgaacatacggtgaagcgacagcatcccgtagtagtccaggcactcatcctcctcccagcacggggccggggtcgacccggatagcgccattcccgggggagggaggcggaacaagctcagaacccggcctagaacccacacagcggggagggggcagtggtcagcgacgcggaggcccgaaccccacaccgccagcgcgtctcccccgcccaatcgcgccgggcagggccgctcccgcacccccaaccgcctcggcctccccctcccccgggagggaatggtcccgcccgaggtcccctaagaacaggtcgggacgccggagcccgctcggcttctgcccccaccaccgtgctacgttcggagctcgcctccggacctgaccaaacgatgcggcccaaacaagcctcggggcccaccccggggctccctgctgactgcccctgactctgggtaggactgcccagacgagccccttttctccgtccagcggtaccgtctgatgagtcccccggctctacgcaagtggtacctcccgaaagtgaccctctgccccctacacagaggagcgacccaggcagcccctttgctccacacaggtggtaccgtccgaacccgaccccctcgccctgcaagggcggccccgcccgctccccagagcccaggtggtcctgtctacccgccaccagtcaccattaggcctctctggatcctcaccagattctggcgtccgatgactcctgggcgacggccgcagccacttgttttggatctttctggcaccttctctattattacgcctgcgtcacctcgcccctcctccttcccccaactcgcgcaggtgcgaccgccacgccccttcggcgcatgcgcagaacgaggcctccaagccccgcccttcctgggccgcttgacctgcccccaaccgaagcatcttggttcgcgagtgctgcgcttgcgcagagcgagagcacgccgcctcttgggctgtatctggtacccggttccaggtccctacttcctgcccgtgactcaagccaccggggccatgtagcgccacgtcacgagtagttgtaactactcatctcataaactacagccccctcctgatcacgagctagacgcccacatcaccactgcccctagttgcccgtggcaaagtaacacaatcactactttcccgtctcccagtaaactcccaggccttatatgatctggtcctgggcactcctccattagattgtccctcacttctagtgacaaccagggatctacatctcaactgtgctctctcgtgatcccaaatggaaatcccgcccccccaccaccacccccgcagtctataagttccttcccctgatcaaaaccagaattccctcatctcacgttcaggacggatacctccttccaagcggcaacagaaccctccattccgactgtgtacatctcgatggcgtccatcacgacccccatcacagtcagatgtctccacccagagccaaaacggcccctccgtaaccccttccaatctctgccctccagggtcgcccagatacccgctccctaacttgcaacaactagagagggtctgtcagggagtctaggctgtggtgtatgcgtgtccccttaccgcggggccttgggtgtgacggtcgccacgccccccacttaggtgactcaaggtcaggacctgcatgtacttgagacaagtcccctccctggacctcttcccacccccgcaattaactcctcttgggagtcgggagatctgggtcctgcctagcactggcccagtactggctctgcctgagctgtagcagtgaattcaaaagaatcggctgcgcgcggtagctcacgtctgtaatcccagcactttgagaagccgaggtgggcggatcacacgaggccaggagttcgagaccagcctggccaacatgatgaaaccctgtctgttcttagccggatgtggtggcacgcgcctgaaatcccaactacttgggaggctgagacaagagaatctcttgaaccagggagcagtaagcagagatagtgccactgcactccagcctgggccacagggcgagactttgtctcaagaaacaaacaaacgccaggtgcggtggctcacgcctgcattcccagcactttgggaggccgaggcgggcggatcacctgaggtcgggagttcgagaccagtctgaccaacatggagaaaccccatctctactaaaaatacaaaattagccgggcgtgctgacgcatgcctgtaatcccagctactcgggaggctgacgcaggagaatcgcttgaaccctggaggcggaggttgccgtgagccgagattgcgccattgcactccagtccgggcaacaatagcaaaactctgtctcaaacaaacaaacaagaccggacgcggtggttcacgcctgtaatcccagcactttgggaggccgagacgggtggatcacctgagatcaggagttcgagagcagcctgaccaatatggcaaaaccccgtctctactaaaaaatacaaacattagccgggcgtggtggtggacacctgtaatcccaactactcgggaggctaaggcaggagaatcggttgaacccgggaggcggaggttgcagtgagccaagatcgtgccactgcactccagtctgggcgacagagtgagactccgtctcaaacaaacaaacaaaccctccaagaaatcccttcccctctctgggcctcagtttccctacttgtgaaacaaatggatggcaatggtaagctacggaagcatagtcctgggctaaactcacaagggggcctggtaagtgactatcattaaatcaaacgaagagtagggagaataggaaagcaatttaacaaactgtgaaggattctgtcttgctaagtgggttgtagtgggcgcctacagtgtatgagcgctgtgcatgtgtgatatcatccaatcccctaaacaatctttgaggtggctgtgactcaagctcacttcacaccagtaaaacagaggcccggagaggagaataactccaagtgtgtcgggctctaaagctgtactctcagaaatgctccgtctcttcagctttgaaatgacatctctgtcaaggtctcccgccgcccagttcactccatgggcccaacgctcaccaaaggttgcccgagtttctctacagaacttgccgacgcttagcccgggagcgacccagagaaatgcgcaggcgcatctcctcgccctgagccccgcccacagggcgaagatgtgtgcgtggataactcccagagccccgcctgtgtggcaacacgcaggcgcaaggtcgcgtgccctgcgctgcaggctctgattggtcgccacgggtaagggcaccgcccaatgggaggtgtggatagtgaggggtcccacacgcctggagccgagggtctgtgtcaagagcggcaggggctgcaggagataagagaaacgggtgagggcgccgcgcggggctggactgggaagagaacgctgggcggacggagggggcggaaggaaaactaaggggtctgcagggatcgaagagccttggggcctgcgctagggcgggagcggcgcgggctggaaggagagcactccttcctgtgtgccctggggctcctttagtgtgcgggagcctacgctggaactcgcccaccacccactgctgcgagctctcaccctgccgaggagctcagtctggtaggagacaagcgttgtaaagcgggaaagttgaatttccagggccctagtgggttccttcctggaaagacttactgatatactgtgtgaaaaacccccattctttccctaagtagttcacaattcaagagtgggagaaagaatcgtagacgaggaaagggcaaatttcaagtctcccgggccacctcgtagacatttattgggtacctgctttgtgcaagctttgcagcaggcactgggcctcgccctaggggagttctctgttggaaatggggctgtaatcaaggaaaaatggaactctcgggcccctggttgcctacttccaggaaggtcctttgtggaatggctgttgtgtgcaggggcctggcaactcaaaaattaggaaggggattggaatagtagataaggaaagtttagctccagctcctttagtgaataatttactcaaggagtatgtattgggcattaactgaaagcagggccctgtactgggctgtgtgttttgggaattcacagtctaatggggaagttggtctggtagaaatggactgtgcatagggacagttaaactcagggtcggccaggcagtggcttacacctctaattccagcgctttgggaggcctgggtgggaggattgcttgagctcagtagttcgagaccagcctgggcaacatagggagacctctctacaaataatttaaaaattagccaggggctaggtgtggtggctcacacctgtaatcccagcactttgggagaccatggtgggtggatttcttgaggtcaggagttgaagaccagcctgggcaacatgatgaaaccccatctctactaaaaatacaaaaattatccaggcgtggtggtgaatgcctgtagttccagctactcaggtgaccgaggcgggagaatcgcttggacccaagaggcggaggttgcagtgagccgagatcgtgccactgcactccagcctgggcaaaaagagagaaactctgtctcaaaaaaagtaaaataaaataaataaaaataaaaatttgccaggcatgatggcagatacctgtggtcccagctactcaagaggctgaggcaggaggatcacctgagtccaggaggtggaggcctcagtgagccaagatcgcaccactgcactgcagcctgggcaacagagtgagaccctgtctcaaaaggaggaaaaaaaaaaaaaaacctctcaaggtctcacttcccaagggaggctcactgcagcctccacctcctgggctcaagtgatcaaaccaccttagcctcccaaagtgctaggattgcagatgtgagccaccacacctggcctgggagcatttctcagtcactaaatatgtactgtgtgctagacattgttcttggcactggacgtgcttcagtgatgtgcaggctaaactgctaccgtctaggtgcttaatatgagcaacttttttttttttttttcctccttgagacagagtctcactctgtctccaggctggagtgcagtggcgcaatctcagctcactgcaacctccgcctcccggtttcaagccattctcctgcctcagcctcccaagtagctgggattacaggcgtgcaccaccacgcccagctaatttttgtattttttttagtagagacggggtttcatcatgttggccagcatggtctcgatctcttgaccttgtgatcgcctgccttggcccctagagtgctgggattacaggcgtgagccactgcgcccggcaatatgagcaacttctatatgcaaggctgtaaaccagactccacctgccctctggcactaatagattaggtgaaaaagaggtaaagaaggtgggtttgaattcataaaattagctgctaggcctgggagggaggcagtcatttgttgagtgtactctgagtccctgctgtgtgaaggggcctgggtggggttgagcccacatacgtagaagggaagatggggcatatagagggaagtttgaaagttaaaattcctgtccctgctcagaggttttgttgctgactggagcctccacaatgaatcagacccacaaactctcagtccagtgaggaacagtgagatgccaccccaaactcatgatatttgccatgatagaggtggcacaggataccataggaaccctgaggatgtagagatgtcagagaaggcttcacaaaaggtgctgggtaggagtttgtcagacaaaaagaggagagaagtttcttggcaaagggaatagcaacatcaaagacttagggtctaaaaacaatctttctggagaactacacagggttacagctgacctttacaagtaccagggactttgtgtcagtactacttttagccccattttacaggtaagaagacaacctcagaggaagtaagtggtagagctcagattcaagccaagggcagtctggttccagggcctgtgtttttaaacacttgggtgtatctgtgtgtgtatatgtaagaggcagaggaaaagcattgcacaaagagaaagctgcacgcaggcaaaggctatggtattctcagaaaaggtgtgcctggccctctcggtaaagaggccaggctggctgggccgggtgtggtggctcacacctgtaatcccagcactttgggaggccgaggcaggcggatcacgagggcaagagatcgagaccatcttggccaacatggtgaaaccccatctctactaaaaatacaaaaattggccgggcgtggtggctcatgcctgtaatcccagcactttgggacgcccaggcgggcagatcacgaggtcaggagattgagattgtcctggctaacacggtgaaaccctgtctctactaaaaatacaaaaaattagccgggcgtggttgcaggcgcctgtagtcccagctactcgggaggctgagccaggagaatggcctgaacctgggaggcagagcttgcagtgagcagagattgcaccactgcactccagcctgggcgacagagcgagcctccatctcaacaataacaacaaaaaaatacaaaaattagctgggcatggtggcgcacacttgtagtcccagctactcgggaggctgagacaggagaatcacttgaacctaggaggtggaggttgtagtgagccgagattgcgccactgtactctagcctggcaacagagcaagagtccatctcaaaaaaaaaaaaaaaaaaaaaaagaggccgggctgttggccggggtggtggctcacatctgtaatcccagcactttgggaggccaaggcgggtggatcacctgaggtcaggagttcaagaccagcctggccaacatggtgaaaccttgtctctactaaaatatatatatatatatatatatatatatacaaaaattagccaggcatggtggcacacccctgtagtcccggccactcaggaggctgaggcacgagaatagcttgaacccaggagcgagaggttgcagtgagccaagattgtgccactgcactccagcttgggtgacagaccaagtctctgtctcagaagaaaaaaaaaaaaaaaaaagaggctgggctgagtggtgtttctctcctgcaggctgccgtggggtgtgtgtaggcttcagagacatgggatcacggaagactgaagcagaaacagtggattaagacttcctgagcgatagctggtgagtagtgggatgtgcaagagaattccacctccccttggtttcctgctgtctcactggctcctgcccctctttctccaggcactgccttccccacaatggcagaggtggtggctgaggtggccgagatgccaacacagatgtcaccaggggcagtggagatgtcaacacctatgtcggcagagatgatggagatgtcaacagaagtgactgagatgacacctggggaggcccttgcctcatccctcttcttccagcatcaccagttcatgtgctctgagtgtggcagcctctataacacactggaggaagtcctctcacaccaggagcagcacatgcttgctgtctcagaggaggaggcactgaccacacagaatgttggcctggagccggagctggtgccgggtgctgaggggcccttccagtgtggtgaatgcagccagctcatcctctcccctggggagctcctggcccaccaggatgcccacctccgagagtctgcaaaccagatccaataccagtgctgggactgccaggagctgttcccctcgcccgagctgtgggtggctcatcgaaaggcccagcacctttctgctacggtagctgagccaccagtgccacctcctttgcctcccccaacaccactgcctccaccttctcccccatccgaagtcaagatggagccctatgagtgtcctgagtgctctaccctctgcgccacccctgaggagttcttggagcatcagggcacccactttgactccctagagaaagaggagcgcaatgggttggaggaggaggaagaggacgatgaggaggatgaagaagatgatgaagagatggaggatgaggaggccatggcagaggtcggtgatgatgctgtgggaggtgacgagtccacagctggctgggctcagggctgcggggactgtccccagcaccagccctcagcaggggctcgccggcaacaccggcggacggctcacagcccggcatctgccacccaccccttccactgcagccagtgtcagcgcagtttcagctccgccaaccggctgcaggctcatgggcgggcccatgttggtggcacacatgagtgtacaacctgctccaaggtcttcaagaaagcagcatcgcttgagcagcacttgcggctgcatcgcggggaagcccgctacctctgtgtagactgtggccgcggctttggcacagaactcacgttggtggctcaccggcgggcccacactgccaacccattgcatcgctgtcgttgcggcaagacgttcagcaacatgaccaagttcctctaccaccggcgcactcacgccggcaaaagcggggcacctcccacaggagcaacagctcccccagctccagcggagcccacccctccaccaccaccccctgccccacctgcccagctgccctgcccacagtgctccaagtcctttgcctcagcttcccggctgtcccggcaccggcgtgcagtacacgggccccctgaacggcgtcaccgctgtggggtttgtggcaagggcttcaagaagctgatccacgtgcgcaaccacctgcggacacacacgggtgagaggcccttccagtgccactcatgtggcaagacctttgcttctttggccaacctcagccgccaccagctgacccatacgggtgcacgtccctaccaatgcctggactgtggcaagcgcttcacacagagctccaacctgcagcagcaccggcggttgcacttgcggccagtcgcctttgcccgcgccccccgcctccccatcactggtctctacaacaagagtccctactactgcgggacttgtggccgctggttccgcgccatggcgggcttgcgactgcatcagcgggtccatgcccgagctcggactttgacgctacagcctcccagatcaccatctcctgccccacccccacctccagagcctcaacagactatcatgtgcacagagctgggggagaccatcgccatcattgagacatcccagccactggcgcttgaggacaccctgcagctgtgccaggctgcactgggggccagtgaagcaggcgggctcttgcagttggacacggccttcgtgtgacgcagctgaaaagcaacaacaaaagggtttggttgcaacagccagtgtgggtacctctggggagagaggacctcctctgacaaactggtctggtacccaccatgtgccaggatccaccctggcctctttttacccactgactccccagaacaacccttccaggcttctcttgtcatctttctctgcctgaggggaaactgaagctctgaaatgcgatgtgatctgtaccaggtcacccagctatgctgcaaagtgggttggccaaggccctttgcactgcatcaccctggtgcccagcaacatcaggtaaccttcactgagcaccaagcttatgccaggtctgtgctggccactctcatatacctcttcagatcctctgcttgtacccccagcccttgccttccctggattttgggcacccaggactttgctctgcctggtggagggtacttgatttctctgggcttccttcatctcaattctgacagtgtggaaggaaatctgtaggtacccaggtcctcagctccagactgggtgatgctggagacccaggagcaagtcagcacaggctctgcccacaggaggcatgcacaatctggtaggagaaacgcacaagtacagatagcttgctctctgagtgtgtctcattgattcattcagcctgtgtgtcctaaagcctcccttctcccatactgggtgatgctgggggcagagatgagtcaggcctaaggcttctctgggctgtgatggggatgtgcagggacagtgggatcccaggaaacagacctccatggtgggagatcaggagttaaggacttcctagagaaggtagtccctgaaggaaaagtaggaatctggcagtgaaagaggaaaagaacattccaggcagacagcactgcaagagggtgagctcttggtgtatttggagaccatccagttattcatctgactgcctacctgaggcaagcaccacacttaccactgtatgtgtactatgatcccaacaggcttgtgacatagatttcatattatccctgttgtatagatttttaaaactggtggctgggcgtggtggctcacgcctgtaatcccagcactttgggaggccgaggcgggcagatcacgaggtcaggagatcgagaccatcctggctaacacggtgaaaccccgtctctactaaaaatacaaaaaattagccaggagtggtggcgggcgcctgtggtggccagctactcaggaggctgaggcaggagaatggcgtgaacccgggaggcggagcttgcagtgagccgagatcgcgccactgcactccagcctgggcgacagagtgagactccctctcaaaagaaaataaaaataaaaataaactggccaggtgcggtggctcacgcttgcaatcccagtgctttgggagactgaggcaggaggatcacttaaggccaggagttcgagaccagcctgggcaacagcaagacctcatctctacaaaacttaaaagttagccaggcctggtggcacatgcctgtaatccgagtgctttgggaggctgaggcaggaggatcactcgagctcaagaattcaagacctgggcaagagagagagactttgtctctattaaaaataaaaatgattggccgagcatggtggtgcacaccagtattcccagctactctggaggctgaggcggaggcaggattgcttgatatgagggagattgaggctgcagtgagctgtgttcacaccactgcactccagtctgggcaacagtgcaagaccctgtcacttaaaaaaaaaaaaaaggaaaaaaaaactaaggacagagatttgcccaaggtttcacagctaggcagagatgtgagatttgagtacgggaggcccctgcggcccacatttgtaacccatactattctgagtgattaagacctgaaacttgtgcaggggtaggggatcagaggaagattcattctaactagaggaaaagtaaaccagtgtcagagctattgggatttgaaggggcttcgaaacatcaaaggtcttgagagcaggaagattcccacctttttcagaggttacctaggataatagtctttctctccattgattgattgattgattgagatggagtcttgctctgttgcccaggctggagcacagtggtgcagtctcagctcactgcaacctccaccttccaggctcaagcgattctcctgcctcagtctccctaatagctgggattacaggcccccaccactgcacccagctaatttttgtattttagtagagacagggttttgccacgttgaccaggctggtctcaatctcctgacctcaggtgatctgcccgccttggcctccctaagtgctaggattacacgtgtgtgccactgagcctggccataatagtctttatctccctaagcacatgcaggtgattcctgataggctcctcccaggcccctgcagcccagggtgctcaggcagggcaggcagaatgcagttggggatggaattgtccaggagggaggcctagactttggaaggccttgaaagctggctgagtagttccaggttgggggagggtcgtaactggtgttagatctgggctcaaagtggggtgagtgggaagctaaagatggtccagcagaagacagggctggacctgggaaggggtcatggggtggtagaagggtgagggacacctcactgacttcacggctgaccacgtgtgagtagcagggaggaaggcgtccccaggatcccaaggtctgcccctcgcccagaacagccatcctcccccttatccatcagcttgctctgtatgttcattcattgatactacaaaccaggcgaaatctgggtggtgttgagcaaggaaggggcagggtctgtcctatcccaggcagtgtaaagatgcccctggagtgggttgagcaaactggagagcccagaccccacaggaacagtcccttcactccatctgggacatttgaaactcctccctttttgttcaccggtggaatccagtagggggcatacccattgctcctccccaggcccccttccacctctggggtgtcctggccacactcactgctcggtgccatgtggaggagataacatttccttccgcccatgccccactatctggccccagcatgttttaagtgaggataaaagtcaagttctctgtccccaccttcacagggttgtcacttcccaacatccctaagaggtggaccaggtaggtgtcctgtttaagacttggaaatgaaggcttggaatcttctagggttccatctccagccatggccacccaacaaagagtctacaagcaggctaagttttggcctgagtgactcctcatcatctcatgtccccccagaccctagagcagcaggcagcttgggctaagacagacggcccattgttcaagtcctgactcttctgtcacttaagctccatggccttcccctctctgatccccagttggctcaccagttactgggaggttaatccctccctccctaagcagaagcagatgatttatgctgggtcatggagcaggctcctcctaggcctctacagcagataacccagatggagctcatcaccacacgtgcagagaaagccacggtgtgagaaggttgggcacctgagccagggccttcggacagccctctgcctgagatgcagctcactcccgtcccagaacagtccccccaccggaagcccccaccacctcagcggaaacaggcagccggacagaaagcaggttttcatgccaataatttattgaacggaggtctgtacacaggcaaaccttactgtggaaactaagacatcaggagctctctccactcccctggccctccagggtggggtgaggagggagtagaccttgggggcagaggacaggaggggagttacagctgtaggaggggcggggccaggttggacggtgcgaatcgacgttttctttaagaaaaaaattataacaatctatttacacccgggggccagggaagggaagaggagacgggctgggctggttctatttacaagggacacaggaggggagggggtctggaggaggtggaggtctgggggaggggagggggccaagggggtaggaggtcctcatccccccaacaccctgtccttctcttccctccccacaaccagttaaaatcctcttaaaaagcccaccacaggggtgaggctggtgagggagggactggaggtggggacagggactcatttacctctgccctctagtctaggggcccagccagggcaggagcttgatgggctatggccccccttcccagcccctcttggggctcccagatggaagtggaagggtgcttggtggggccctcaggaggagttagtgagggtaggtgtggcatcggtcgactgccagtctgagctggtcggagtctcagttaaagctggagggaggcagggaaggagcagagttagcctttgcctttcagacaccccttcgcccaacccaaaagtaggaattctcttgtcatagatgctacattaaaagttacaagctgttactttaggtgaagggttgcaaactcaagtgctaaagggccacgatagtaactgagtgacacaccagagtgccaggctccatataaggcggtggctgggctgggcacagtggctcacgcctgtaatcccagcactttgggaggctgaggtgggcagatcacaaggtcagcagttcgagaccagcctggccaacatggtgaaactccatgtctactcaaaatacaaaaataagccaggcatggtggtatgagcgtgtaatcccaggtacttaggaggctgaggcaggagaatcacttgaacccaggaggcagaagttggagtgagccgggattgtgccactgcactccagcctgggtgacagaaaaagactccgtctaaaaaatataaagggcgcccactgtctactgtcagtaggatgggcgggcccattgctgcccaatctgattttcttccccaagagaaacaggaaatctgaatttttacataaaatagccccatttttaaacgtggacaccatggccaggcacagcggttcacgcctgtaatcccaacactttaggaggccaagcgggaaaatcacctgaagttcaagaccagtctggccaacatggtgaaacctcatctctagtaaaaatacaaaaattagccaggcgtagtggtgtgtgtctgtaatcccagctactcggaggctgaggcaggagaattgcctgagcccaggaggcggagattgcagtgagccgagatcgagccactgcactgcagcctgggtggcgagtgaaactctattgcacaaaaaaaaaaaaaacaaacttgggcaacgaattcaactttttgtttgtgttcaggccagacgttatttctctggctttcccattggcattaaacacatttaaacatttgtacgcaagaataccctctaaaggtggtcattcacatgttgtaagatgtgtttcctatgccatcaaaatgtcgatgatttaaaaatacattcaggaaacccagtcactgagcgaacagccccaccctctccaggctgagagatactttaacccccagcagatggtccccacttaccttgtgaggacggggtgagggtggtagtgcccgctggggacctcaagtgaggagggatgagaatggcgttgagagacggttggatggagagttctagaaacaggaattgacatgctagtcagggtagactacagcagggttatgatgggcaccaaatgggaacccagctattgggaaggccagttgtttgtggacaccttcagccacagacctctctcaatgaaaaaccagaaaaagcttagcacaaggcagatcacagtaaagcacaactgaagcaggttcgattccccctgaatctgggagtcatctttcctgagccccaggcctgccttgtaccctgcccttagctccccactcctgcttcaacaccaagctcctcacaatctttggctgcccccctaccccgccccactccccagatcccaggctatgccctcaccaccagcactgaagttgaagagagggggaagtgggcggttgttaggcagctgggttcccagacatcgcagttcatcaaagaagctgtgcgcacaggcctctagtggggagagccttgaggatggggtgtactccagcaggctagagcagagcgcgatggcctctggcggcgttcgagatttgaacacctgagggatgggtgcagggctcatgagggtgagatgccctggacactggcatactcctgttatctcactgccacagtgcctgcggcaagttatgactggttgcttcccacacccccaccttccaaatgaagaaactaaggcccaaccactaaggagaggtcagtttgtatcgggtaagcaggcagcccaggtctgggactatatgagccctgctgaccctccataaaaattggaatcttgaatttacttgtgggttctcaacttttaaaatgccataaactttgaaagcggatggatgttattgatccctggataactcttcaaatcctcccaagccgtgattctgaggctaggtccacagaacagttgacctccaagggggaccagctctcagccatactgccctgagcccctagccctgccccacctttgtccaggggtgagctttaatctgagggaacttgaactccgtgtagttggggttcatctctcggatttgttcccgggttggtgttcccagcacctgtaaagagagggaggggtctgagacaagggccccatccctcagccccaccccctgcccagcccagccccgcccctcaccttgatgatctccaccagctggtccaccccactgtccccagggaagatgggctggcccaagaggagctctgccagtacacagccagctgaccaaacatctgaggggaaatggagggagcgtcagggctaggcgagtagggccaccaacctcccaatgcttttattcctcatggccatcctaagagtgtcaggagccccgttttctcaaagacaaagcacctggcccaaggtcacatgcagcttagaaacatgggcccgaccttgaccctgcctttgctgtactctctagtctaggtgtgtttccagccctcagttcctctctctgctaaggaccccaatgagctccttctctcccgctagccttggacgacagaccaaattaggcccaaacctgccaacaggcacccatgttctttgggccacaggaaggtacagccttaaatcctggactgccttcctcttgttccagcctctctcctgcccatgagaagagctgcagcgtggcagtctcacccctccctgctttgtaccttgacccccacagcacgagttcatacctaaggactccacagttcgtcatgctgctgtggaaggtgccctttcaaactctcatgcccattccctcaattcagacttcccctcatgcctggaaaatggcagttgtccccacaaacagggaaggacacagaggccctgggagcaagttgcaccttcatggtggcaaagccttgcttcccggttcccccaaggtctccagcagcccttccccctagctgagaacagagggctgacagggaggttccagagctggtatggactctggagtcaggtcagctttcaaatcccagtcctgcccagtcctagtggtgccagtgcgggcaggcggcctcacagctctaagctcatctgtaaaattagcattcaacagcatcagcctcctaagtttgtgaggactggatacaagaacagaagttaagctttcatcaccaagcttggcatacagcacacagaaaactccaaaacttcccagattgccactccccccgccaccctcccataactctgaccgatggatgaggtgtaatcagtggctccaaagatgagctctggggcccggtagtagcgagaacagatgtaggagacattgggctcccctcggaccaactgctttgcactgtgggaagagatgggcaggggtacacgtgaggcaagggttggggtcccccctgcctcttcagccacccaacatgccccaggcccacctgccaaaatcgcagagcttgaggacagcagtgtcagggtccaccagcaggttctggggcttgatgtcgcggtgacacacgccctgggagtggatgtaggccaagctgcggaagagctggtacatgtacacctgcggcgggcacaggatagcagaactttagcccagctttccccatacagcaccactaccccaccagcttggcctgaagagcccttccaggcccactctccctgctgcccccacagctttggggaaacccatttgaaaccttggttctcttaatgtgcaccacaatcacttgaaggacttgttaaaacagggactactggctgggcgtggcgggtcacgcctgtaatcccggtattttgggaggccaagaccagcctcgccaacatgttgagatcccgtctctactaaaaatacaaaaattagccgggcgtggtggtgcacacctgtaatcccagctactcgggaggctgaggcagaagaatcacttgaactcaggaggcggaggttgcagtgagccgagatcgcaccactgcactccagcgtgggtgacagagaccctgtctcaaaaaaaacaaaaaaaaagggactgctgggccccactcttagagtttctgatcagtgagttctgaatgaggcatttgcaacaagctctccagcactgatgctggtccccggaccacactctgagaaccactgctttaatcacaacccttggcagaagcctgatgagtaaggtacatcgggaggttgtcataaaacaggctagggagccaggcactcagcttccccctcaccaaaaccactggctccttaatccgacaatcaaaaccacccctgagcctgccccctctccagctccattttcctgccactctccctcccactgactagaacagaagtaccgtgagagcaggattttgagtttcagttactgctgcatcccccagggcctagacagaccaggtcctgacatggctgcttcctaggcccccttccttttattccagttcccctcggccaaagatgccacttccttgccctgtgcttggtctcctccaggaagccttccttgatccttctcacccacaaaccaggctgggtgcttcctccatttccagaattccctgtgctccttctggtatggcagcagctagttcatttaatagttttctgtgatgacgcctttctaccctaccaaactgagagctcttcaaggccaaggcctgggtcgcagtcagtggtgcctctggaattcctcagccctgggacccgtatgcaggcagccacaggacagattcgccaaaccagagagctcccctcctgggaagtgaggtccaacagccacaaccactggtagagcccacgtcggctcacccgtgcttggtacgtaaagccagcaggagcagcagctgggccccaagtgaccttcagcaaacaaacccacccacctccttccaatgcagtaggctgctccagcctgttcgccacatcatccctgggctgcaatcattcattcattcattcaaacacctcctgaaggtctgtaacacccagggcacgatgccaggcactggggaatgagcctgcacagatgatggacggagatgcattcctggctctgtggatgctaaccttcctccagccctaactccttcccacctacccccagccaaggctctaaaggcccgaactctggcctcagcagctgtctctgtgcagtcctggtccccaccacccccttatcctgagctaactccaacatctctggtgccactggactccctgtatggacctgagcaactacctggcagcttctgcaaccccaggtgtcaggctgccttcctgattcagtcaggccttgcctgccttggccctcccctgtgttaggcgagctccatctcggggggttatgggaacaacagcaggggacatggggcctccaaaaaccaacataaacttggcggatgagggatcccataaaaggcaggaggctccagagcccctggctttgtgggcctgggtcccagcagcccacctgctggcctaccttgacatagaggatagggatggtcaacttggccttggtgaagtggcgggccacccggtacactgtctcgggcacatattccagcaccagatttaggtaaagctcgtctttctgcagggagcaaaggagaggtgtgaggcactgtgagaagagtgaggagggggaaggaaggtatgcagggagcagtgggggaaaggcaggcaggcaggaaaatggctggagcaacccaccaccaccacctcgagatctcaccttctcgccactggagtagaaaaagtatctcagcctcacaatattgcagtggtccagcttacgcatgatctgcagctctcggttcttgagggcaaagggagagtctcagaatacaaccaactctctcggctgctcctccctactcacactcactcccaacaacagccaggcagctactccctgtgtcccagctccaaggtcccctggagtatcccccaattccttgtctccagactattcccctcccacaggagctggaagcccacaggttaaacccaggccacagatgtgttttcttcaccccatttttttttttttttgagacagagtcttgctctgttgccaggctggcatgcagtggctcaatatcggctcactgcaacctctgcctccctgggtcaagcaattctcctgcctcagccttccaagtagctgggattacaggcatgcaccaccacgcccagctaatttttgtatttttagtagagatggggtttcaccacgttagccaggatggtctcgatctcctgaccttgtgatccacctgcctcagcctccctgacctcatgatccacaggcctcagcctcccaaagtgctgggattacaggcgtgaggcaccgcgcccagccaccccacttaaaaaaaaattttttttcaacttattgctgacatgtaaaagccaaatggcaccttctgatttttttctccaaaataaagttttaaaaaggataggccagggccaggcgtggtggctcacgcctgtaatcccagcactttgggaggctgaggtgggtggatcacgaagtcaggagattgagaccatcctggttaacacggtgaaaccctgtctctactaaaaatacaaaaaaaattagccaagcatggtggcaggcacctgtagtcccagctactcgggaggctgaggcaggagaatggcgtgaacccaggaggcggagcttgcagtgagctgagatcgcgccactgcactccagcctgggcgacagactctgtctcaaaaaataataataataaataaataaataagataaaatttattattattattatttttaaaagaacctggctatgttggccaggttggttttgaactcctagtctcaggcaatcctcctgcctcgggctctccaagttcaaggattacaggcatgagctaccatacccagccttaaaataaaaataaaataaaaaacagctgggcatggtggctcacccctgtaatcccagcactttgggaggccaaggcagggaaatcacttgaggccaggagttcgagaccagcctggccaacgtggcaaaaccccatctctactaaaaatacaaaaaaattagctgggcatggtggcgcacgcctgtgattccaactactcaggtggatgaggtacaagaattgcttgaacccaggaggcagaggttgcagcgcttgaacccaggaggcagaggttgcagtgagccgacatcacaccactgcactccagccttagtgacagaacgagattctgtcttaaaaaaaaaaaaaaaaaaatagagaccatcctggctaactcggtgaaaccccgtccctactagaaatacaaaaaattagccgagagtggtggcacacgcctgtagtcccagctactagggaggctgaggcagaagaatcgcttgaacccggcaggcggaggttgcagtgacccgagatcacgccaccacactccagcctgggtgacagcatgagactccgtctcaaaaaaaaaaaaaaaaaaaaaaaaaagatttcacatctaaatccagttttcagtttgtcttgaaaaatcagggctaggtatgctggctcatgcctgtaataccagcactttgggaggtcgaggtgggggcggattacttgaggtcaggagttcgagaccagcctggccaacatggcaaaaccctgtctctactaaaaatacaaaaaaaaaaaattagccaggcatagtggcccatgcctgcaatcccagctactcaggtggttgaggcacaagaatcgcttgaacctgggaggcagaggttgtagcgggccaagatcgtgccactgcactccagcctgggtgacagagtaagactccatctcaaaaaaaaaaaatcaggcatgggcacatgaggcttgcccccctacctggcacaagcaacaacagacaggtagtggccatccagctcactctggtcccgtggaagcatctgggtcctcgaactctatctaggatcctgagtcccagactccaggcattggacttttcccagaatgcggtctcagcattcttccccattctctattcctcagtgaggcctaggaactccctgcccctacatccctcttacttctggaactcaactccaatcaaattctgacaccctggagctcctcctgcccaagggccctccctgccaagaccgaggccctggtctggttcctttccagtctaggctcagttctcctacatccagactagtctaagctccaaatgccaggcccttaaacaccaattattcctcaacttccacttcctccatctccttctagttccctgagcctctcctagctcacagggcacctccattccattctgcgctggccaaacacctgggaagagcgcgaccttcagaaccacccgcgctagccctgccaggtccctttctctcctgggaagaagtgtaaccaaatggttaaggtagagggtttgggaatcagattccagccttgactggggcacttgctctatgacctcaggcaatcctcttacctgagtttgtttccctgcttttaaacttagcttacacttagaatgggtataaccacagtacctaccctcagagaatctttatgtaaattaaacaagaatttgcttattaagcacttacattgagcaaatgcccagtaaaagctctgggctctcctgggatccacatttcccatctttcacaggtctcatttcctcttttcccccttctcttctggcccatggctctgaaacccaagcctccagctctctggctcaggttctcccaccagtcacacccagtccccaaacctccctgtccccatcccgcccaagctaccttgaacctcttgtcctggagaaccttcttgatggcgactagttccctggtctctgccagccgtgcctggtacacgaccccaaatgagccattgccaatcactttgatgtccgtgtaagccacttcttgggagcgctctgggccttggcctagagtggctacgactgtggtcaccttcccgctgtcacctggggaacaaaggggatacacgatccactgacccatcctgcctgcgcatcaccctatcctggggctgtgggaggaagggaaatctctgcaggaagctcgttggggacctctttgtcccctcctcctctttgaggaaaggtggatgctgggaccttcccagtgacttttcccctcttcctttctgggaatcttaagtcctgctcccctccacataggaggatattgatacctaaatctctctgcttcaagggttggcaaccccaaatttctacttctaggaagcaacagatcactggtccatcttggtactgggagacatcagatgttgactccatctactctggatctactgccctctggcccctcctatttggagaaagcttgaccgagcctcttccacttcagggagcagtaaccctgaggtactcctactttaggaaagcactaacctctctcacagcctagaggatactgacctctaagtcctcccctgtagagctggtaactttactggttcttggtgacagaaatgaatgtcctctcctgctataagtgccagtgccctgaccctcactttttggtactttgaggttagaaaaaaacactgacctgacctcttcatctgagtggtccagagacccagacccctcactatatgtgggtggtccctaatggacaagcaccaaattatgataatgatgaacctgacctttattatcaaggagctattccagcctcagtcctttgaaggaaagctataattcccaattcccattattcaaatggtggcaaaccttggtgccattcttagaggatagtgacccctttgagtaactgatgaaccaaatccatttttttgtttttttttttgagacacagtttcgctctcgttgcccagctggagtgcagtggcacgatctcgactcactgcaacctccgcctgctgggttcaagcgattctcctgcctcagcctcccgagaagctgggattacaggcgcccgccaccacgcccagctaattttttatatttttagtagagacagggttccaccagttggccaggctggtctcgaactcctgaccgcaggtgatccgcccacctcagcctcccaaagtgctgggattacaggcgtgagccaccgcgcccggccaccaaatccattttgaggggccagtgacaagttctttcagagggagataaccctacatcacttttttttttcagagccaatgacaccataccttagaacaattattaaaaaagtataaccttagatccatattctgtaggaaactgtgacctaccctgctccattccatttttgttaaaggagacacaccaagccatgtattttaaaacatggactatggacttggtttgaaggatatgctgactcccaatgtctttatatctaaaaggcagtaactattaattctcaccattggcagtacagctcaacaagatttagggtgggtaatgatgccaggtcttggttttaatagggaagatgatctgagtaccaggtttggaaagcctggccctattctttggggacaaaacacagtaacctcaaagccctgcttctaagtgatattcgctccaaatccccatcttctgaaggacagggaatgcagatccctctttttcggggttggtcttattcttgttctcttaggagacaataaccctagatccccatttgcaagcgactgtgacctctgatccaatattataatgaatagcaacatcagatacctgttcttaaggctcaaggacccaagacctcaataatggaagaacagagacttgtaacccgtttctttaagtgttagtaattctgatccacgagtaattctgatctccaagagatggtaaccccaagactccttttcctgggaggaagagggctcggatccccggtatggggaggcacagtgacctcgagctcctatctaagcacatgaaagaatctgatggatgtctgaggagctttgggaaccctaatcaccaccctacacgggcgccactagtactcacggcccagcttcaccccgggcggcgggaagctagtgcctgcgccggggcctccgctgcctcctccgccgctgccgccgggtccacccccggagctcgaggccccgacgcccccacccatggccccgacagatgcctttccgccgccggtgccgcctgggccggaggccgagcctccggggccgccgccgcctcctccgcctccgccgccgggctccgcgaacgagctagtccgcgccctgcccgagcccccagggccgcctcccgaaggcccgccgccgctcatggcgccgagcacaggcccaggctgcggggctcgggctgcccgggctgccccagccgccgccgctgccgccgcctcccccgggccctggcctcttccaggccgcgccgctctggcttgggctccggctccggcccagcgcccgccgcggggcacgccgggagatgcagtccggctgtcgtccgcgccgccgtcaccgccctcggcccgcacagagagccgcgtggcacgccgggaaatgaagtccacaaaagcctcagagtagaccgcgggaatgatgggcgggaatgacgggtcacgctgtacgtcgggaaatggagtccagggtaatctgtcagccgactgtacgacggggagccctgaagcactttaggaagcagagagcctgatgcacgctgggaaacggagtccactcactcagtctattagctgtgtatgcctcccagagctcggtgcgctctgggaaattgagtcggcccgcgtgaacctgcgggtctcgggccgtgaggcaagccgggaaatggagtcgtcgccacgccctcaccgcattgcaggtgtaaagcgatttttaaagcacgccgggaaatggagtctcaggtggtttttaagccccaggtggatactgcagttccggagatgggcgaggaaatggagtaggtttacgcgctcctctttccaggtacgctgggccgcagtccctgccgggaagtgtagtcagcaccaaggcctcagtgcagttgccacagcgagccctggtgtgttctgggaaatggagttcgacgtatcctccccattgactgagggggcgggatcgcccatgagctccaagcatgctggggaatagtccagacctgaccctctgtgaggccagtctgcggaggcttgccgggaagcgaagtccaatggccaccatcaggggcgtgtgaacgaaaggttagagactgcggcagttccctggagagacttaaaagtgtttcagcgcctccttcctcgcccccaggtccttctttaagaaagagccgaggtcgatcaaggactgctggaaaatggatccaagcacctttaagttccaggtgaccatagatcaggaaagaaaaaatgtcccctctctaaccgcaactctgcaaagattcgggaaacaaagttcccggcggtttctcagaacactaactagtcttcggatacagtctagcttttcctagcaatgtggttcgcaccaggaagctgaatggagcattaaaaagacggaaatgtcatttctgggcctggcgctgtggctcaggctgggcgccagtagctcacgcctgtaatcctagcactttgggaggccgaggctggcggatcatccgaggtcaggagttcgagaccagcctggccaacatagcgaaacccccgtctctactaaaagtacaaaaattagccgggtgtggtggcgggcgcctgtaataccagctactcaggaggctgaagcaggagaatcgcttgaacccgggaggcataggttgcagtgagccgagatcgcgccactgcactccagtctgggcgaaaagagtgagactccgtctcaaaaaaaaaaaaatcctgtcttgaaccaccattcagttttcagtttttggtttgttttgagacagggtctcgctctgccgcccaggctggcgggcagtggcgcaatcacaggtcactgcagcctctaactcccaggctcaagcaatccccccacctaagcctcccatgtaggtgggactacaggcgtgcaccatcacgcccagctaatttggtttggtttgttttttggggtggtggggggtagcggggtgggcttcgccatgttgcccaggctggtctccaattcctgggctcaagcgattctacctcagcctccaacgtgctggtatttcaggcttgagccacggcaccgggcctcccactcttgtgttttgcatcctccgcttcctaaattacaagatcccggaaagccaaaaataaggaagccagctgcctcaggttttgtgtactcagtgagtcgtcctatttatcgattaatacccgaaggagagtagcccccaaaaggcgctgggaaacagagttcctgtgtctgtatgtgtctcttcctcccccggaaatacttagaagtagaatgaaagcgttctcagcccctcccgcatcctggaatggtgggaaatggagtctctggacttcacgttaatccgagcttgtgcttatactaactgtcctgtcctttctgaaaccagaagaaagtcctgtccactcagtttgttcctgactgcaattccccgcggacacaactgcgggggtcggtagcgccaaagcctgttgagactacattacccagaaggcaaagtgcggaacacttccgctcccttcacaaagcaggtggccgcaccacgcgcggctaggcgcgggcgtttctgggagttgcagtttcccagccaaatggtacctgctgccctctgatggcagctctgagtcaaaaagtaaaaatttcagtcgagccccttggcctagggattccaacgcgggaccaagacggctcaaaagggcggcgacatggggcaggatagcgagggttatttaaccgccagaacccgtggggcatgcgccgctgcgtgtgggcaaccgccacgaggggattggggtccgtgggagtttgaaggtgacggtctgcaatctatcaggatgtttgtagaggatgagaatgttcatagagggatgctaggaagggttgtaaacgtctgagagaggcctatgggtgtctagaagggctaagaggagtccgtggagtggtgaaggggtctttgatgagcttagttgacaggataattactggggaccagtggagaagcctgaggggacttaggctgtctgctaaaagttctatgggtgggtggacgcgatggcttacacttgcaatcccagcactttgtgaggtcaaggccgtggatcacttgaggtcagtcagaagttcgagacccgcctggccaacatggaggaaaccccatctctactaaaaacacacaaaaaaattagccgggcgtggtggcccacgcctgtaatcccagctactcgggaagctgaggcacaagaatctcttgaacctgggaggctgaggttgcagtgggctgagattgcaccactgcactccaccctgggcaacagagtgagactctgttttgaaaaaaaagaaaaaaaaaaaaggtctatgggagacagaaattactggtgaccaaggggatctctgagcgacctgaaggggtgagggatggttgagaagcattgggaaggggctttgagagtctgtggaggtactggggctacacgtacaaagcagggaggtctctgatgagattaattaatatgtgaagtgccttgagagcatctgtaaagggctttctacttggaagcaaggatctcagaggatatggatgggaccaagggtgtcttcttgcaggaacatttcaagccagctagctaatagatttaggtgggcgattaaaggttagagtagccgctggagttttcaaggccaaatgccacctgtgacatcctacacagccagaatctggggcaacttgtctggtagggctgtggtctgacctggacagcagttagggagctgagctgagcacttatgattccatattagatgtggttagaggtgctttgaaggcactgggttcaggggctgaggccagtagttagggtcctctcctcccgagtgacaacatccccttctccatcaccccaccaccaccaccaactcagctgcaactatgttgccaggagacatgtctcatcccagcttccagaaatagcccagtggcccccaccccagggaatgacttacatcacccaggagagggagcagtttcccgcaggccgcctcgggagcctcggtttcctgccagtatcctagccctggatcctctcttccctgccaaccgacatcatctgggaccacccaccctggctggcatgaaatgagatgcgagtgggtagcagttgccagtcaacgtttcttccccctcagggttgcacagggtggagtttcatggcgaagccagtccaacaagccctcaattgccactccatctcttagcagctgtgtggccttggggaaaccccttcccctttctgggcctcaggcacctcacctgcatggtggagacagaacttgtctctaagggtacttccagcctggattattcctcctaattctttcatccctgattcaagctctccaatctcagcttctagctctatgagctcatctcaaatcctctgatcctgaaagcctgatctggatccaactatcttggtgttaggaaggaaaagtcaggagttgttgaaagaacgtgggctttgaagtcctggctcagccacagggccctgggcaagtcacttagcagcactggttgcccctaccttactggatactgaaggagctacaacactgcagctcttaagtattggacacacagtaggtcaacagcatcgatgactagtgagccagtcccttggctgtgtgctggctgggggtgttcccatacctggacctgaagatcaccaagttaccttgcaaggtctacatttcaagagacaccacaggctgttctccaaaggactcccagctgaactcagagcaacaagagaggggtgtgggcagggtgcgaggggcagtgcaaaagggagctcctggtcttcactggggacctggggtgtgggaagaattcctagccacaagtgggaaggcatccaggcaatcagaagagcaagggcagtggggttgtggtgaaaaacagtgggaagagctttcaaggacaaggtccccatggaacagaggagcagtctgatgaagccggcgcatgcctgagaccactatcatcaagctctggggctcatgtgcctctgaggtcaggagacggtttcccaggcctggatttggcccattctgattagggttaggccctctatactgatctggccacagacccactagcagccagggtggggcccctccttcagaatcaagcaaaagctgtggccctcagggggctgcaccgagcacctaggacattgatcactgcatccaaaggtccaaagttttattgttttgaatacattctccagcggcccctctactccccccaccctcagtccccaatacagaataaggcttgaccacagccccccaccccaccccagaggccccagctgggaggcagagggggcttccagtttggtttcagggcacccccttcccatccccccacccgcctgcccatgggccagtcctaggagcagctggggatgaaggggttggaccggtgctggggtggggagtgggagagggatagcaggcacttgtagagatttgtggcccatgggcggcacccctcaccctcctccgccccccaccccccaacacatggaatttttggttcattataaaattgtccctccctcccctgctgtgaccttgtggggtatgagaaacctaggcactcatggccccctggaggggcagggcaggcagggctggggctgaggagggctgggagtggggcagagcgggtgggtcagaggggtacaagaggcagagaacagggagggagacaaggctttacttcctaagcgattgtaatagaaaagttcctgggtgttaaggccaaagcctcaattcaaatataaattccccagaatggaggtgacccccttaacttccccctccctccccctaccaccactttgcccagagcttagaaacccacagagacagggaatagcccctagccctgggcacccacccacccccaccatttttaaaaaaaagaaattaaagttttatacaaaatgtggggagggaaaagggaggaggcagggaagagacaagagagctgccctcacctccagggcatagggggcttaaggcagcaaaagaagcatggggggtgcggggcacacaggtcccctgcccacagccctcaggagtctcggtgctccagggagagctgggccgtggcatgctggaggtcagagctcacccgccttggggtgaggggccccccagcctccccaggcccctccccacgcaccttcttgtcctcaccctcatcctcaaagcccccagcggggcccccacccccttcgaggcgacagtcttcactccagcgccgcttaaagcgtagcttgaggggcatgcactgggatgccccgggtgcctcgccgggctcaggcttagggggtgcaggtggggcacggggcgtcttgaacacctccccgtcttcctcatcctcatcactgatgtcagtcacctctacctcctccgactcgccttccgagatgggctccaccttgatctgtggtggcgggggcggtggggctagcgcccctgccccctcagccagcccgcctgcactgccaccgctcttgtcagcaccggctacggccttctccccagctgcccgctgccggcgtccgagtgggggcggctggagcttaaacttgaatggggaggaagaagaagaagaggatgacgaggccgaggaggggaccggtggggtctcgggtgccatgggcggcagcgggcacttgtcagggcgctggggctggggcaccaccagcccagggtagtgcaggaaggcgcgggggctgaggtggtagttgtagacgctttgggtgtgggcctgcaggtaccgtttcatgtcctcagggctgaaggagaagtgggagcctccccctgagccgctgggccccccgccaccactggggtacatcgggctcagcgtgggcgagggagtgtaggccaggtgggtgggcgtcatgggcagagccggggagagctgagggggcagcagggatccaggaccggccagaggcgacacagggaaggggctgaggggttcagggccaccccgaggccggggatagactcggaagacaccagggtcatggggcaggcgggccagcgggggccctcggaaggcacccagatccggagggccgggtggtcgggcgcggggatcctctcccagcggttcctccagctctgacgtgccatcactacagtcactgactgagcctcggcccaggcggcgggccaccacagccgagaagagggaagatgaagatgaagagcaggctggtggtgagcgggggtcctcggtgggggacagcacctcggagggcgttgagggagggaagcggaagtggctaccacccgacggcactggcggggcactctggggcactgcaccccctggcagaagggagacagtgtcaaggcccctggcctagcctgaaggggcatgtagaccctctccacaccaaccatccctggtactcaccagccaaccccacatcaatgaatgggtaattgaccagcaccagtttgttgaaattgaacttgtaggtgaaccgtttccccttggtcttgtgcagaatgcgcttgttatagtaatagctgtgggtacagaaatgccattgggaaggtcaggtacgtgggacccaggtctagactccacaccttaacacgcacttaggtgtggttcccaaaggccaactgaggaacgtaggccacaaaagacaaatcaagtgcccagagggtgggtaccagctctctcctcacatctaaggcaggactagaggatccactggtgactgtaatctctcctcaggatacgtctgtgttaccaaggggctcagggaagggctgggagtggcccaaggtcacacagctaggatttggcaaagccaggggtcagacccaatgcttgttcccacaggcaaggggctgtgcaaccccgggggggcactccacatgtgctcaggggtccccagcccgtcctcaccgcagggcccggctcagcttgtcgtaattcatctggggcttgcacttgcgaacgccccacagccgggccacctcatcagggtctttgatgacgaattccccgtagtccccctgccaggcaatgacgccctggtactcctccttccgcagcagctccaggataaagtgccacagctggatctgccttgagccaggggacgactctggcttgtaggcccaatccgggaaggcaaaccctggggacgggaggcagggagtggcctggggtcaggctgccaagtccagggctctgggtcccatcccagggtccacctctgccctgccttcaacatggggaaatctgtctcacctcagccaagtcaagatctgatttaagagaagacagtgcgtgtctgtctgtctgcatgtgaggggctagacaggagctgggggggaggggaagctggagcccgctccagcgacaccgggagaaacaggaaaccgtcggcggtgggtcccggggccagtgccagggggccaggcaccaagccaggctggcgggcagggctgccagtgggggaggggcaggaaggggcacacgtggccagccgggttggggtacagccccccagcttacccccactcccattcagagccagttgcaccaccccagctcctcggatgtcctccttagaaacatgcactgtctcctccgaagacccaacagagcccctactcccaaccccaagacctgagaggaagattttttttttttttcttaaaaggaccaggaggggtggggtgactcggttgccgatgaggtcagcgcttgcacacacagaggcttctgtcttccctggagagtgaaacccagactgtctgagaggccccccaagccctggaccctctgagctacactgccctccccagacccaggcatccaggccccacctggctggagggcccagcccaggcctggagcttgagcaggcaccctggagctgtcaccctcttcccacttctgccttctcatcttcagctccttccctgcccacctgcctgcccacccccagcattaaccttgggtagaggttggcggtgggctggctggtctctggagggggtgggcagcctggggtggggggtggggggtggggggactgcggttgttgtcatttcccaacaacaggggccatcaataattcagcaccaggcagccggtaatggaggggtgggaggagggaaaggggaggaagggaaggagtggggaggcagagcagggtccctggtgccactagagagagaaggccaaggtggccagctaaagatgggcggctcccaaatccagtcaggctgcaggggtcaatccgcctcccttggccccagctcaaacaggtaccaacaaggcctccaggcaacacatccaccctcaaagactccacccaagtctggaatccaacaagggatccttccccttgggaatccagggaatcagtagttcctgctcccacagggaccaccccctccaaatccagagctcactgtaggcccccaactcctgcccagactgggctgcagtaccacatagcccccggagtccctgccccattcagatatatcccagccttccaccagcccctcagggtgccagggatatgacctccagctgttcacagaccagcaccaacagcccctgttccatttaaaagtgacagcctttgacaaccccttccagagaccccagagcaccatcgctctcttgggaatctaggtgttcaacccattatcctcacccttctagagaatccagatcacaaggtctcctgcaaggcccagggtcctttggaacccaggtgacccagccaccagcttcatggaccctcatatcccctccaaaaagctcccagcccctctcagggaaccaagctccatgttacttccacctcagccccaatctggctctagacctagaaggggggccaaagcccctgagacatcaatctgggggtgggggatgtactgacttccaccctccccccaaaattaaagccacccttcccagcccacccgccccagcctccgtgtcccggtaaccaggcaacgtgtgtgcagcgacagtcctgggagcgggggagcaggaggctaaaaataaactttgcagaagagagggagtgagagagactacatgcaacacaaagggaactcggaaaggaggtgggggggctctggaaaggcctcaagccgcattctgggagctgtcccaggcccccttgttaaaccccttccctgagcaacccctcctccagggcctggaccctggctcccacttctggcagggacccttccccactcccaagcccaccacaacggcggctttcctcatcggacacagcatacatgaaggcctgttcccggctttgggggggggagaatgaagagggggtgacgtcagggtgtctcaatggggctctgttccccaggccttggagccaggagccaggcacgggcaaggggagcatgtgtgagtgtgctgtgtatgcgtccacgtgcttaaaacagggaaacaccagacctgcacggaggaagcttgggggtgcgggacctcgggaacatgggggccagtgaggcagggagagagcaggcacatggagagaggggttcaggagactgcgagacagagtgcagaagtggcagcagtcagacagcaagggctgggatggcgaggtcccagaagcacacctgggtcccacagaggcggggtagggattctcccagacagactatgcaagcctggggggacaaaactcctgggcaccccccaacctcacgtgacggcccaaactttttttaagggactatgagggtcggaagggaggagtggtggcagaggaagaacacgccggcctcctggggggccccaccacctcccccactccaggcggccctctatggcgccagagccgggaagaaaacaggaagtgggaaacagccacggcagagagagggaccgggatggagaactggatggaggggtgcggagcggcaggccaggaggcagacgggaaagatgcaccgatcggaggccattccaggcctccttcccctcccctcccccagccggaaaacccacacactgtcccgccccccgacagggttggggaagcgacccgcggatcctatcaggccaaggccggtagcagggagagaagatgaagcgaggttgtctgggtgcctcggcctcctccttgggcgagggtaggctcctgctgcccccagggcccagccacccgggagcgagtggaagccgggggagtgtgtaggacgcacgtgactgaccctaccgcactccgcaccccggccccacccccagggcccctcctcggtccgggtcccaatcccctggcgccggatcccagctcggagccctttaagattaagccgcccccacccgccgagcagggggatggggatgggaatggggtgggaatggggtggggatggggtggggtgggtgggccggtcggggcacacacccgcacacaggagcccgagccgccgccgccgccgccgccgccgccgggggaaggaaacaagtttgaacagcggcgcccggcccccttccccctcccccgtccccgccccgggccggattccgacggggtagacgggcagggggcggctgggacccctccccctgcgcgctcgggcgcaaagtccagcccgcgcgagcccgggggcggcgggggaggggagggggaaaagtccgagtgggagggggagttaatcccgctgccccccgcccgccgaccgagggggaggggaaccttggccccttaaggaggagcaagttggcggggaagagaggggcggagggaagagacggcccgctgaaagagaagaggtggatccgggagggggggcgaggggggagcctctgcgtctccccccaccttccccaccctcctcaaccccgggccaccggtggcgcgggaggagggtacccaggtctccccggagccaccttaaagccgcgcgttctaaggtcggaaacaaaaagttcctttttcgaacgttcgggctgcgctttggaactttgcgactcggcgagggcgggggagcgaggagccgacagaggcgggcgggggaggggcggcgcagccaggaccccgagtcccgggctccccactcacgccctcctcctagaggccatcccgtatcccccgctaacctggtgcagggcacgcgccgccgtgaaggtcaccagcaggaccgcgcagcgcagaaccagggatagcgggcccggtggacgagcccccccgccccgcacacgtcccggcccccagagtgcaacgtgacaagagcggaggggaaggaccccgccacccccgtgatcccgggagtgggggagagcccggcctgcggggtcccggtagggatacaggaccaagacccgcagcacccacaccactccgcccggagccaggaatcgggggtcccaggcagcaaccccgctcgcgccacgagaagcaacaggtctccagtgcttgaggggtcccccagaactggggatcactcgggctcccccggaccccttcagcccccccaaagtttctccgttcggtttcccggggcaacaagtctcccccacacgtgctgcccccgcccccacctgtgtccgccggggtcttcatgctggggggcccggggcgaagcgccccgattccgggccgcggctcccggcgccctcgctgccccgtcccgtcccgcgcccgtcgggccgccctcgccgcctcacccggcctcgcctctcagagcctctcccctccccgccgccgcctcccgggttaatatcgcactccggggccgggacgcccacgccccccggccggcgacgtcaccgccgcgtcgccatggagacactgcgcccgccccctccccgcgcactcacacacacgctcgtcggcgcgcagccactgaggaccggccggctctgggcttaaaggggccgcgcggcgggggagggaggaaggagggggtgggggtgggatggggtcccgcgggtcatgaccctagtcagaggctccgagtctgcagctaacttaagtcttcggcactcgctacctgctgcccctcctcctctcctgcccactgcgggctccagagtttcttttgggagcctgtatgggaaaacggggggcccttccgaggaagcgggggtcagaaacttttgtggggagggggcagaatcttctctgcagaggggcggggtcaggaccttagaagatgatgaagaccacagcatttcccagcttggttttacccaaccccccaaccctgagcctgaatgggggcagctgtccaggggtggggtggaatgggtgggatgcatttcccagcatcggaaatggggaggcggctgtgccctccgctcctgtggggatggggtcttggcttccctgataacccccgtccagctggggaggaagtgaccagagagaatgcatttggaagcccccaccaccaccgtccccaggctgcagctgtcccggggatagggctggcgccggaggtccccccacgtccactactaggaccgggggttccggaggcggggccgggatacgagggggcgaccaaagtctgaacaaatgtgctcccaaggggcactgagggtcgccaggagagaggaagacagggcttaagatcgaaagccagagcgtagagaagtgttaagtctccgttctctgcctcagccgggagggaaggatgaagcctgaggctctgggaaacaggaaatcacagcgcagatctgatggagcccaggagccggcagcagggtagaggccaaatagaagcaatattcacaggcatagcctggaaacagagtctcaaaaaagactctgaggttccgaaggaggggcgtatgggtggcgggcgggagttgggggggctgggtgggggacgaatccagaagatgggcggggagacagaaaagtcacagatagggaaggcctgcggagctcaggctcccggtacccagggcttcaatcccagcctcctcgcttgcggggtacctagtccaccttagacaggctcctcaccagtgcctaaaaaaaaaagtctcaggcctcctccttggggagaccaagggctccagggaagctttcccccacaacccccgggaattatgtaaccttgcctacggacagtacagctcccccacggatattgtaaccctctgggagcggtgtggtccagcaataataatcatcttcattgttcgaataacagctcccgaattccgagtgttcatgatgtgccaggcaccgggccaagcattgtcaggggcatcttctcatttaatcctcacaaaatcccaacgaggggaattactgctgttatccccatttacagataaagaaagtgatgctctctgagggaaaatcagtccactaaatcttacagccaggaagtattggaactaagattcgaacccagatctaaccaattccaaaccaccacatttaccctttaccattatgctttattacctcttttactaccccctccaaaaaaaaaaaaatgcagattttcaaagatactacatcagggcccggcgcagtggcgcacgcctgtaaacctagcactttgggagccgaggcgggagatcacttcaggtcagaagttccagaccagcctggccaacatggtgaaaccccatctctactaaaagtacagaaatttgccaggcgtggtggcgcacctgtaatcccggctactcaggaggctgaggcaggagaatcgcttgaacccaggaggatcgcttgaatccaggaggcggaggctgtagtgagccgagatcgctccgctgcactccaccctgggtaacagcaaaactccgtctaaaaataaataaataaaaaggctgggcgcggtagctcacgcctgtaatcccagcactttgggaggccgaggcaggtggatcacctgaggtctgtagttcgagaccagcctgaccaacatggagaaaccccgtccctactaaaaatacaaaaaattagccgggcttggtggtgcatgtctgtaatcccagctgctcgggaggctaaggtagaatcgcttgaacccgggagggggttggttgcggtgagctgagatcgcgccattgcactccagcctgggcaacaagagcgaaactcagtttcaaaacaaacaaacaaacaaaaagataacacatcagtaacaaacccagtgacccctaccctcccaccagcaagacagagatgagttacacccaaccttttttttttttttttgagacggagtctcactctgtcgtccagggtggagtgcagtggccccatctcggctcactgcaagctccgcctcccgggttcacgccattctcctgcctcagcctactgagtagctgggactacaggcgccccccaccacgcccggctaatcttttgtatttttagtagagacagggtttcaccgtgttagccaggatggtctcaatcttctgacctcgtgatccgccagcctcagcctcccaaagtgctgggattacatgtgtgagccaccacacctggctgttacacccaacctttgctacttcttgtctctgacaaggcaagtgaactcagttcacctctttttttttttttttttttttttgagatgggggtctcactgtgttgcccaggctggattgcagtggcacaataatggctcactacagcctcgacttccctgcctcaagcaattctcccacttcagcctcctgagtagctgggactacagacacatgccaccatgcccagttacttttttttttttttgagatggaattttgctcttgtcacccaggctgtaagtgcaatggcacgatcttggcccactgcaacctctgcctccctggttcaagcaattttcctgtctcagcctcctgagtagctggaattacaagcgcccaccaccatgcccagctttttttttttttttttttttttgagacgcagttttgctctccttgcccaggctggagtgcagtgacaccatcttggcacatcgcaacctccgtctcctgggttcaagcaattctcctgcctcagcctcccgagtagctaggattacaggcatgcgccaccacgcccagctaatttgtatttttagtagagacggggtttttccatgttggtcaggctggttttgaactcctgacctcagatgatccacccgcctcagcatcccaaagtgctgggattacaggcgtgagccaccatgcccagccaacccagctaatttttttttatttttagtggagttggggtctctctgtgttgaccaggatagtctccaactcctgggctcaaacgatccgcccaccttggcctcccagagtgctggaattacaggtgtgagtcaccctgcctagcgaagttcacctctttttttttttttttttttttgagatggagtctcgctctttcgcccaggccagactgcagtggcgctatctcggctcactgtaagctccgcctcccgggttcacgccattctcctgcctcagcctcccgagtagctgggactacaggcacccgccatcacgcccagctaattttgtgtatttttagtagagacgggatttcaccgtgttagccagaatggtctcgatctcctgacctcgtgatccgccctccttggcctcccaaagtgctgggattacaggcgtgagccactgcgcctggccaagttcacctctttgagcctcaattttcctcatttgtaaaatggaggtgttaatagatcctacatgatcaagttattgtgaaaaatcagagatgtggccaggcgaggtggctcacacctgtaatcccagcactttgtgaggccgaggcaggtggatcacctgaggtcaggagttccagaccatcctggccaacatggtgaaaacccgtctctattaaaaatacaaaaattagctgggcgtggtggctggcgcctgtaatcctagctactcaggaggctaaggcaggagaatcatttgaacccgggaggcggaggttgcagtgagccgagatcatgccattgcactccagcctgagtgacagggcgatactccgtcttaaaaaaaaaaaaaaaagaaaaaaagaaaaatcagagatgcaaagtaagtatgcaataaatactgttaataattattagcagagtgaactctatgccccatggataacaagagcactctaccctacagactccaactgtaacaacagttagagtaaacagcaataaacaggctggctgcagtttgtgtctgacacatgtaatcccagcactttgggaggccgaagcaggagaatttcaagaggccaggagttcaagaccagcctgggcaacagagtgagactctctctacaaaaaatttatttatttttttttttatttatttgagatggagtctccctgtgtcacccaggatgcagtgcagtggcaggatctcagctcactgcaacctcttcctcccaggttcaagcaattctcctgcctcagcctcccgagtagcctagattacaggcttgcgccaccacgcccggctaattttgtgtttttagtagagatggggtttctccatgttggccaggctggtctcgaactcctgacctcaggtgatccgcccacctcggcctcccaaagagctgggattacaggcgtgagccaccaagcctggccgggaggatggttcttactggcagatctgtgtccgtggtgtccaaagggcagcccaggcttatgttttctttttcttcttttttttttttttaatttttattttaagttctgggatacatgtgcaggacgtacaggtttgttacataggtaaacgtgtgtcatggtggtttactgcacctatcaacccatcacctaggtgttaagggacattttttcttaaaaataaaatttaaaaaaataaagcacactgcactgacagtgtgaaattgtgtattaatgtcataatcccactctgacccagatggttggctcaaactcagtgtttctatgaaacacaatcacggatgatcggcatgcctcgtgggagaatctgaacgatccgcggagagtgaaagtccctcgtgaaaatgtcgtctgggcctcttaagtttggtggtttgtgcaaacgtgtccatggatattgtaatctttcagtggcctatgtgactccaattgctttatcaacactgatacccacccccagagatggtagagatggtgaaatattggccaggtgcggtggctcatgcccgtaatcccagcactttgggaggctgaggtgggcaggtggatcacctgaggtcaggagttcaagtccagcctggccaacatggtgaaaccctgtctctactaaaactacaaaaattagctggacatggtgtcgggtgcctgtaaccccagctactcagaaggctgaggcaggagaatcgattgaacccaggagacagatgttgcagtgagctgagattgggttcaagtgattctcctgcctcagactcccgagtagctaggattacaggcgcacgccaccatgcccagctaatttgtttttgtatttttagtagaggcagggtttcaccatgttgccacgctggtctcaaactcctgacctcaggtaaccaccctctttggcctcctgaagtgctgagattacaggcctgagccaccacacccagcttttttattttttatttattattttttttttgaggtggaatttcgcttcgtcacccaggctggagtgcgttggcacgatctcggctcactgtcacctccacctcttgggttcaagcaattctgcctcagcctcccaagtagctgcgattacaagtacccgccaccacgcctggctgaaaaccctgttttcttcccccccgagacagagtctttctctattacccaggctggagtgcagtggcacaatcttggctcactgcaaccaccgcctcccgggttcaacctattcttctgcctcagcctcccaagtagctgggattacaggtgcccaccaccatgcccggctaatttttgtatttttagtagagatggggtttcaacatgttggacaggctggtcttgaactcctgacctcgtgatctgcctcagcctcccaaagtgctgggattacaggcgtgagccaccgagccctgtttctttctttctttttttttttttgagacggagtctcaccatgtcgcccaggctggagtgcagtggcgcaatctcagctcactgcaactcagcctcccgggttcacgccattctcctgcctcagcctcccaagtagctgggactacagaggcccgccaccacgcccagctaattttttgtattttttgtagagatgggctttcaccatgttagctaggatggtctcgatctcctgacctcgtgatccgcctgcctcagcctccaaaagtgctgggattacaggcgtgagccactgcacccggcctaaccctgtttcttaagaaaaaaagatagtgtgatgcgggggattgagtccaatctctccccctctgcaaaaccctgttgcagtgttctctatcaaaacaaaacaaaaatttaaaaaatgaatagtatgactcatctcatatggtatagccaccatacacagtgtgaccacctctaaacagaatgtcacccccttagagtatcactctttctcatctccctgactgaagatgctgaaggcaccagggctcagatccctcttttctcctgtctagactcattcccttgataacctccaccagtcccacagtggatatgccatctctatgctgattacacccacagttatttatttatttattggtttatttatctctctcctctccttctgtctccctccctccctctctctctctctctctctctcgtctctgatctctctctctctctctttctttctttcctctttttccttcttgacagggtctcactctgttgtctggctggagtgcagtggtgcgatcacagctcacagcagccttgacacccttaggctcaggtgatcctcccacctcagcctcctgagcagctgagactacagctgtgcaccaccacacctggctaatttttgtatctttttggagagatggggatcttactatgttggccagactggtcttgaactcctgggctcaagtgatgctcccacctcagcctcccaatagtgttgggattacagctgtgaaccaccgcgcccagcctccgcccacaattctatctcaatctcgactctcccctgaactccaatctggcacatccaactacctcaccagtgtgtctatctggatttctcaagcttgccaaatcaaaaatggtcttcctgaactcccccaaactgctgcccccacaagcttccccatctcaggaaattgcaattccattttgctggctgttcaggctgaataccttggagtcatccttgccccctttctctcatccgatatccaatctgaagggaatttccaccagctctacctttgactattctagaatcagctacttttttcttccttttttcgagatagggtttggctctgttgcccagggtggagtgcagtgacaccatctcggctcactgcaacctccgcctgccaggctcaagccatcctcctacctcagcctcccaagtaagtgggaccaagtcatatgccaccactcctggctaatttttttttttttttttttttttgagatggagtctcgctctgttgccaggctggagtgcaatggcgtgatctcagctccctgcaacctccgcctcccgggttcaagggattctcctgcctcagcctcctgagtagctgggactacaggcgcctgcccccacgcccgactaatttttgtaattttagtagagacggggttccaccatattggccaggctggtctcaaactcctgaccttgtgatctgcccacctcggcctcccaaagtgctgggattacaggcgtgagtcaccatgcccaaccactcctggctaatttttttgtgtatttttttgttgagatggggtttcactatgttgctcaggctggtctcaaactcctggactcaagtgatcctcctgtctcagcctcccaaagtgctgggattacaagcgggaggcattgtatccagcttattttatttatttatttatttatttatatttttctgagacagagtttcgttcttgtgtgttgcccaggctggagtgcaatggcacaatctcggttcactgcaacctctgcctcccgggttcaagcaattctcctgcctcagcctcctgagtagctgggattacaggtcagggtggtctcaaactcctgacctcaaatgatccacctgccttggcctcccaaagtgttggaattacaggcctgagccactgaaccgaactggattcagtctatatttttcactgccttgtcaccagcgcctagaccagtgagtgtcatagaataggtttgtaatattggctgggcacgatggctcatgtctataatctcagcactttgggaggccgaggcaggcggatcatgaggtcccaagatggagaccatcctggctaacacagtgaaactccatctctactaaaaatacaaaaaattagccgggcatggtggtatgcacctgtagtcccagctactcgggaggctaaggcaggagaattgattgatcccaggagacagatgttgcagcggactgagatcacgccactgcactccagtctgggcaacagagcgagactctgtctcaaaaaaaaaaaaaaaaaaaaaaaagagagagaataggctgataatatgtatttgctgaagtaagtgaactgagtgcacattcacctggtccaacccacaaaaaatatgaacccatacaaatggtgcaatgtccataactaataaacccccacatacagtgtgagccccagtgtagaaagtgagaccctcaaatgcattgtgagtctctcatatagatggcaagatagcatataaataatttgtgggtcacgcgcagtggctcatgcctgtaatcccagcactttgggaggctgaggtgactggatcacttaaggtcaggagttcgagaccagcctcaccaacatggtgaaaccctgtctctactaaaaatacaaaaaaattagccaggtgtggtgacgtgcacctgtaatctcaactacttgggaagctgaggcatgagaatcgcttaaacccgggaggcggaggctgcagtaaggtgaggtattaccactgcactctagctctggccaacagagcaagactgtctcaaaacaaacaaacaaacaaacaaacaaaaaaccaatttgtgccccacacaatctacttgtgagtgttatcgaggcagtataatttctttttttttttttgagatcatgaggcagagtctcgctctgtcgcacgatcttggctcactgcaaccaccaccttccaggttcaagtgattctcccacctcagcctcccaagtagctgggattataggcgcttgccgccacgcccggctaatttttgtatttttgtagagatgaggtttctccatgttggccaggctggtctcaaactcctgacctcaggtgattcgcccgcctcggcctcccaaagtgctaggattacaggtgtgagccaccgcacccggccatttcttcttttttttgagacggagtctcactctgttgcccactacaggcgtgtgctaccacacccagctaattttttgtatttttaatagagacggggtttcactgtgttagccaggatggtcttgatctcctgacctcgtgatccgcccgccttagcctcccaaaacgctgggagtacaggcatgagccaccgcgcctggcctgtatttttattttttggagacacagtcttgttccgttgctcaggctggagtgcaatggcgcaatctcagctcactgccacctctgtctcctgggctcaagcaattctcttgcctctgcctcccgagtagttgggattacaggcacccgtcaccatgccttgctaatttttgtggtatttttagtagagacagggttttaccatattggccaggctggtctcaaactcctgatctcaggtgatccacccacctcagcctcccaaagtgctgggagtacaggcgtgagccatcacacccagccgaatttttgtatttttagtagagatggagtttcaccatgttggccaggctggtcttgaactcctgacctcaagtgatctgccttcttggcatcccaacatggtataactcttgtaagcagggggaatccctacatggacattacaaattcaccacagccagagaacatcctaaactgacagtcgagacctcctttcactgcagcaggctccctaggccaagtgaattccctcatgcagagtacacacctctctgctaaaagtctaattctccctcactcctgatgcaaacggactgtggaacacaaaaccctaccctgatcaataaaaatctcccccaaacataatgtaagctcccatgggcaatgtgaacctctgtcccttatgagcctccccacagacattgtaatctctttcatatcgatgacaaagttaacacagacagggcacatctccatgcatggagaactctctgtggctgctgtgaaccccttttgtgatagcatgaagcactccccatggggctacctacaaaggcagtgtgcactctcttgagtgtaaatttcccccagattcagcatctacccaatgtgcacaatataaactgctttgtcaaacctccctcaactccgggtccacccaatatggaaggatgaattgtcttttaggattacattaacggctagatgcagcggcttatgcttatgatcccagcactttgagaggccaagatggaaggatggcttgaggctagaaattggagaccagcctggacaacatagtgagactccatctctacaaaaaaaaaaaaaaaattagcagggcatggtggtgcatgcctgtggtcccagctactcaggaggctgaggcaggaagattgcttgagcccaggcactcaaggttgcagtgagctatgatgctgctactgcactccagcctgggcgacagagtgagaccctgtctgaaaaaaataataataaaataaaaataaataaaattaggccgggagcagtggctcatgcctgtaatcccagcactttgagaggccgaggtgggcaggtcatgaggtcaggagttcgagaccagcctgaccaaaatggtgaatccccgtgtctactaaaaatacaaaaattaaccaggcatggtggcatgcgcctgtaatcccagctacttaggaagctaaggcaggagaatcgcttgaacccaggaggcacaggttgcagtgagccgagatcgcgccactgcactccagcctgggtgacagagcaagactccgtctcaaaaaaaaacaaatttaattaaaaataaataaataggccgggtgcagtggctcacacctgtaatcccagcactctgggaggccgaggcgtgcagatcacgaggtcaggggatcgagaccatcctggctaacacagtgaaacctcgtctctactaaaaatacaaaaaattagccgggcgcagtggcgggcgcctgtagtcccagctactcgggagcctgaggcgtgaacccgggaggcggagtgtgcagtgagccgagatcatgccactgcattccggcctgggcaacagagcgagactccatctcaaataaataaataaataaataaatacaattatattgcagtagtactagtagtatgatagtttaagattatataaataatgtaacagggccgggcgcagtggctcacgcctgtaatcccagtactttgggaggccgaagtgggtggatcatgaggtcaggagttcaagaccatcctgaccaacatggtgaaaccccgtgtgtactaaaaatacaaaaattagccgggtgtggtggtgtgtgcctgtaatcccagctactcaggaggcttagacaggagaaacacttgaacccaggaggcggaggttgcagtgagccgaggttgcgacattgcactccagtctgggcgacagagcaagactctgtttcggggaaaaaaataataataataataacaacagtgtaggttataagattccttccgagtgtgaactcctcgtggacagtgaatttcccccaatctcaacacaaataatttgtgaacagtgggactttctcatagatgtgaatatccttcatattccatgaaccccattggacaactaatatttcttctatgctatgaactagctctatgccctagcacattctttcacacgtagtttgagtgtttcatggacagtatgacttgcaatagactggatgcagtttcctcacaagtggtgtgaattccagtgtggaatctgaacctgtcacaggcaaaagaaagcctccctgcggccagcgtacccatattgcttcccattagcctcggaccagggcgaatacaaagtggagggcatagatgcattgcagacaggttcaccatctggttgtaaacccgtatctgggcagcaggcatctactacaaacagggcatctccctgtcctcctccactccagtgtgataccctcctacccctgggatctttaaaaatctgcctctgtcaggggcgtacacccacaaagtgtagctctccacgtaatgcagtgcgaagccccaagaagcgctgcatttcgtcatctcggccccctgccccaatgcctagtgggctgtcaaactgcgctgtcctaaatgtcaaactcttggaggaggtgacctgtcccccgggccccaggccgcgcgcgttgcctatactgcagcgcgcgacaccccacaagcgcgcgttctctcccctcccggtggcaacagggctttccgcggggccgcgccagacttttcgagaccgtcaattggtcgtagtcccggccacccggcagccaatcaacaaggggaaaggtgacatcactggttctcctcccctcccccaatccaaacttccctactccgtctaccggcagcaacaaccacgtgggggaggggtaagagagtagaaccggtgaggtcattgcaccgccccggccgctgctgattggctgcggggctcgcgggtggcggttggctgctccttgcacctccccctcgtgccgctaccgctgccactgagaggagccaccggcgacgccagagccaggaatacgggtgagtcggggccctgggtctaagatactcctggcgtccagtgagactcacgacgaactgcccttttcgactttttctcctcgccgggtttctttggtgctccaagcactctgtcacatgggagttgtagtctgccttgtactgtcggctatgggccgaagacgtgagaagactacggttcccagcaggaactgcgactagccggtcaacaaacgttcgggccacgccttctacctccgttcattggacaacccgtcccttagcccctcctcctttcatttcattggctactgtccctcacagaggctgggttccggcctaggctgcatggcgactgggtactgtatttgtcatttggaactaagacggcctgcaattggacacgactggtgtccttcacttgttgtagggtagggccctaggcagatcaggcagtcgtaggctcaggttggtgtcggtcccggagggaggccggtcttggactttggccccgccccctagcgctgcccgatgggcccaattggtcgccgcgagcgtcgctcgtcgtcgagaggcggagccgaccagtctgcggatatctattggtctaggctggcgccggtcagtggggttgtgatcgctgattggctggctgctccagctgttgcaggtccattcaccattttgtgtgttggagtaaaaaaaaaagggagaatcgagagggagagccggagggggggcggggagggaccggaccggaccgagccggggccacggccccccgccccgaaaccccgccgagcccaaggtgaggggcggggccagggctgacacaggaaaggggggtccggggggctgggggccgagaggggacaggtggcagggacggggagggggtacagggggaaaggggtgggcggaatggtgggaagggaggagggagtggaggaagtggtgggggtttgacagaaaaagggtaactgggggagggggtggtgggcaaagaagggtaacaggaatggaggggtgacaggactagatcagggtgacagggagagggaggggacagagttggagagtgtgacaaggagaggtgatggggagagaaggtgacaggtccggagatggctgacaggacagtgactgggaggaataggtgacagagataaatgggggtgacaaggagggggtgacaggagggggcctagggcattttaaccgagaggtagagatagaggtagtgacaggatgagagagagagtgtcagagaagctggtgccaggagggctaatgggaacagagggtatgagaccccaaagagccagggcctgggctggcctgggctccgggagttactactcagatctgaggaaggtgagggcccccggggcttgggtgggagttattcagacagggtggacaggaagagagtaggccctaggggaaagaaagcagctctggggcgaagagaggctgggccaggcagcaaggtctaggggtccaggcggcatagttgtaggccctgggtggggtatgcaaaggtttgtgcttggaaaaaactggagccagatctcagtccccaacatggtagtctagtgggtcagcgggtattaggtggtgatggctgcccaacttctgggcatttgggtgccagccccgggacgccctccaggctctgcctgtgaggaccccaggattggcccaagaaagggcaggcctgggactccagggtccacaggaggagcaggcccctagtgagagagcatgaggtcaagggtcccccagtagctggaagactgagtcggggttgcctctcattgtgtttggcttatggttctgggtcccccaaccctcctagaggcctctgttttggcctctcaggttctcttagtcacttcagagtaaagttttttccccttttcttttctcagggcagctcgaaagggggcgggcagtaatgactgttcaggaagtgggtgaggttggcctgttgggcttgtcctgctttctttgaccttatcccacctatccccacttggagttggagggcatatttgggggcctgcggggggctagccgactcagccaccctgccagagccagcccagccagggcggggatgcatgcaggcaagaagaggggggctgggcttgcgggtatcacgctgggtgctgtggggggaggagcaggctcccatccagtgggacagagaaaccctggggtgtagctctgtgtcccactgtgtgatgacgtgtgcgtgcttctgtgcgtgtgtgtgtgtttgtgcgcgtgcgtgtgctcatgcacggccccgtggcagtgctgggtatgagctcttgccccagacatgcccctgcctgctccctgccaggatctggggagatggctgtacctggcagccctagggtgcagagcagagtgggcagccgtccctcgggactctcagctgcccacttcttcccacagtgcctggccatgccaggctgcccagaggggcagagggagggtgggggggtggagaaaggctcatatcacagcccagtcaccaccctttttgtgacttggtacttgtgcatgtgtgtgtgtgtctgagtgcatgtactctctgcatggtgacagtgcgagtaaatgtgccctctggatcatgtgacaggcagcacactgaaatggtcaggagcacggactctggagccagagagcctgggttcagaccctagcactgctgtttcccacctggatgatcttggacaagttgtctcatctttttgtggctcagtttcctcaggtgtgaaatgaggccgatagtagcacctgcttttagggctgttgtgaggatgaaacaggttaataaaggcaagcttagcatggagttcaggacacagggagtgctccataggtgtgaactgttagtgcttttgatgtccccttggggcattcagagcatgtgctctgtgtcctttgcagagccagcaggtgtctgttccccaaggagccagagtgtgtatactcaggggactcaggtgctcacctgtgcctggtgctgactgaggtatcacatgagttgacagcagccagagaggaggccttggggatggtgggatggagacagtagactcagcaagtgggaaatcttagggtacactggctctggagaggttcctgagttgctccgcgtaatcctccgctctcccaccctgcaggtggacaaaaatgaagccaatgaagaaggcatgcactggcctttcaggtcctggcagtggcagcaagtcccccccagccaccagggccaaggctctgaggcggcgaggggctggggagggtgacaagccagaggaggaggatgacgaggcacagcagccgcaaccacagtccgggcccgaagaggctgaggaaggggaggaggaggaggctgagcggggccctggggctgaaggtcctccactggagctgcaccctggcgacccggctccaggcccagcagaggaccccaaaggggatggggaggcaggccgctgggagccctcactcagccgcaagacagccacgttcaagtctcgagcgcccaagaagaagtatgtggaggagcacggagctggcagcagtggggtggctggggcccctgaagagcgggtgcggacccctgaggaggccagtggcctgggggtgcctccacggccacccacctccactcgttcctcctccactgacacagccagcgagcactcggcggacctggaggatgagccggctgaggcttgtggtccaggcccttggccccctggcagcaccagtggcagctatgacctgcggcagctgcggtcccagcgggtgctggctcggcgtggtgatggccttttcctgccggctgtggtgcgccaggtgcgccgaagccaggacctgggcgtgcagttccctggtgaccgagccctgactttctatgagggggtgccaggcgctggtgtggatgtagttttggatgccacacccccaccaggtgccctggtggtgggcacagctgtctgtacctgtgtggagcccggcgtggctgcctaccgggaaggtgtggtggtggaggtggccaccaagccagctgcctacaaggtccgtctcagccctggccccagctcccagccaggcctaccaggcagcctcccgcagcccccacagccactgcaccgtgagccagaggaggctgtgtgggtggcccgctccagcctacgcctgctgcgccccccctgggaacctgagaccatgctgaggaagccccctacaggccctgaggaagagcaggcagagcctggggccaccctgccaccctgccctgctgccctggaccccaaacagcccgaggatgctgaggtctctaagatcagctttggtggcaacctgggtactcactgtgaggagggcgaggagaagcaccctccagccctgggtaccccagccctgctcccactgcccccaccccagctcctgtcaccaccacccaagtctccagcctttgtgggccccggccgccctggcgagcagccctcgccctgccaggaggggagccagggcggcagccgcagcagcagcgtggcctccctggaaaaggggacagcaccggcagcccgggcccgcacgccactgacagccgcccagcagaagtacaagaagggcgatgtggtctgcacacccagcggaatacgaaagaagttcaacggcaagcagtggcgccggctgtgctcacgagatggctgcatgaaggagtcacagcggcgaggctactgctcacgccacctgtccatgcgaaccaaagagatggaaggcctggcagacagtgggcctggcggggcgggccggcccgcggccgtggcagcccgtgagggcagcacggagtttgactggggtgatgagacgtcgagggacagtgaggccagcagtgtggcggctcgtggagactcacggccacgcctggtggcccctgctgacttgtcacgctttgagttcgacgagtgtgaggcggccgtgatgctggtgtcgctgggcagctcgcgctcaggcacgccctccttctcacccgtctccactcaatcgcccttctcgccagccccatcaccctcaccctcaccactcttcggcttccgccctgccaactttagccccatcaatgcctcaccagtcatccagcgcactgcagtccgcagtcgccacctgagcgccagcacccctaaggcaggcgtgctgacgccaccagacctgggcccccacccaccgccacctgccccccgagagcgccactcctctggaatcctacccaccttccagaccaacctgaccttcaccgtgcccatcagccctgggcgacggaagacagagctgttgccgcatccaggggccttgggggcccctggcgcagggggtggaggagccgccccagactttcccaagagtgacagcttagactctggtgtggactcagtgtcccacacacctacaccctccacgccggctggcttccgggccgtgtcccctgctgtgcccttctctcgctcccgccagccctcaccattgctgctgttgccaccccctgccggcctgacctcggatccagggccctctgtgcgcagggtgcctgctgtgcagcgggactcacctgttattgtccgcaaccctgatgtgccactgccctccaaattccctggggaggtgggcactgctggtgaggtgcgggctgggggacctgggcggggctgccgtgaaaccccagtgccccctggggtggccagtgggaagcctggcctgcccccacctctgccagcccccgtgcccatcaccgtgcctccagctgcaccaactgccgtggcccagccgatgcccgcctttggcctggcttcttcaccctttcagcctgtggccttccacccctcacctgctgccctgttgcccgttttggtgcccagcagctataccagccaccctgcccccaagaaggaagtcatcatgggccggcctggaacaggtaagaggtggaagtggatgggctgcgccaggctcacctcgtagagggcctcttgcaagctgaactcttgagaggtgagctcctcaccttgggagggcttcaaggggaggccggcctcctctctgcacagatgttgctgttggaattcacatgtcaggaaagggattggacttttaaggctcaaggcaccgtttccagaggcctcctgtcagagaacgtggtctcaagaggtctatcagtcagcaaacctttcttgagtgcagactgagtcaggtctccatggagctgatgggataagagaatgataattgtggcaacagcttccacatcttgggggactgggcgagggcattgccatggtaagcactgcgtgtaggtgagcttgccaaattttcacatccacctcatagagcacttaccacctgttctaaagacccttttcaaatattagctcattttatcttcacaaccaccctaacaggaaagtgctatgattatgcttctttagaggaaactaaggccagggtcataatttgtccagggttacatggctagtcaatcctggagcagccctcaaacccaggcaggctggcccgtgaccacgtggtcatagtgctggattacagatgggcagatggaggctctaacaggtccttcccaggaggtggcaggaccaggactggagccctcatctttaccactgtgtccagtaaacatcacaggcacggccatggaaggcagcgggggtgtgctgggcacttctccaggtgtgaatctagcctggctacactgaggacagggcgtgtaagccaggagttgaaggatgagtgggaacctgcaaccgtggggtggaagagcctcctgggaggagggcgatgggacagccccaaggccagaaggagcacagcctaggaggggaagagggaaggccagggtggctggagagctgaggctgggggtggaagagtggcatttctgagatggtgctgaacagccacggacccaggctaggctgggccttgtaggagcaacacagagagggtgacagacctgtcggaagctccttcctagcatttctttcttatttgtttatttatgtatatatttttttatttttatagagatggggtcttgctgtattgcccaggctggtctcgaattcctgggctcaagcagtcttcctgtcttggcctcccaaaatgctgggattacaggtgtgagccactgcacctggccttatttatttttatttatttattaatctactgttgattcagggcctggccctgtgctgtgcctggccctgtgctggatggtgctgaggacacagccctacttacacagggctcacagcctctggaaaagacagacccctccctagacagtaacagtctggggtggtcagggatggggtggaggaagccaggaggccgtgggagcccagagaagatgcctgtccagcctgagaagtcagagaaggcttcttggaagaagggccagatgcctatgaactgaaacctgaagggtgtgcagatgtgagcccggcagggtaggcaggaaggatcttcaggcagaggaaagagtttgtgcaaaggccttaaggcaaaagcagatatttgtaagatgttgaatctggaaagtcaaagactctaaatggcaggtgagtgttggggatgtgtggctggattggtgagcaagggtcagatcagagaggacccttaagtaagatcattatgaactgtatcctgagggtactagggagtcatggaaggttttgagcagattcaaccactgctgcaccatagagggtgtgtttgagtctctgaggccagaagcagggagaccagggaggaaggaggctgggtgtggatgtgggtaggagccgctgtggcttgggcttggggcaagagccctttcaggaaggagcactggcctggcccttcccttttggggctccagcccaggccagtcccgagggacagggcacagggacacgggttatgcctgcccctgatgttcatatacagaactgaggctgtgagctgtgtgtttcaccctgacaccaacattttttacatttgttgttataggtggtacaagcaaaatttcacagcagggatttctgtccttaggtaatgaagaaactaaatcagagggtctctaaccactcccctacccttcacccccccatatgcccacaacccccaacatggcccctacagcattgtctcatgtggccactcctgctgtgtggggaggaatggctctggtgcaggggatgctgaggcttaccagagtaggcccagcagggctcttgttaccattttccagatgaggaaaagtgaggccctgacaaatggagagtcttgattgaggccagccagccagtgaggggcaggatgagagctttgagtcatctcccaacctctagactgtgggactctcactaccaaaagtggcagtaataataactcaccgagcagcactggtgatgcacgtgcctggcacacttcaatgagtcctgctgagcctttactccctgaatcctcacaatgccccaggctagtaccatgattattagttccattggacagaggaggaaaccgtagcctgaaaggctaagtgacttgcccgggtcctccagctaggaagagagagagccaggattttgagacagagtctggctctgtcacccaggctgcagtgcagtagcgcaatcttggttcattgcaacctctgcctcctgggttcaagcgattctcccgcctcagcctcccgaatagctgggattacaggagtgtgccaccacgcccggctaatttttgtatttttagtagagccgaggtttcaccatgttggccaggctggtcttcaactcctgacctcaggtggtcctcctaccttggcctcccaaagtgctgggattacaggcttgggtcaccacaccgagctgtcaagagccaggatttgaactcagactgtgcggctccagatcccaggcccttaagcactttcaataataacaatgataacaataatacctactctactgagcgaagactgtgtgcctaaccccgggcttggggccgtttcatcagctccgcctgatgctgtgaagtagattgccaggcctgttgtccaggggtagactgaggatcagagaagggaggccccttgctgggggccacctggttgtcataacttgtccagtgcctatcctggcagttctgaggagcgcctccctaacaacacccatgctgaggtatccaggctgccttcaggttcctgaacagcctgccctttcattcttctcccagaggcctccctaagcccttgggaggtaggcagcttggagccttctccccatggggcccagatagggcagaccgtgttcagtggtatagtgaggttgcaggcctggtcccttctgctggcccatgccagggcctgaccctccatcagagggcagcaggtgtgagggggcggcccagggcagcctgcctgctcctgcccccagccaggcatttgcttccgctgggggacttgctggggcaggcggctggcattctccacattctgtgcatggcatggccagccagctgccgttgccacctccctctgaatcttcccgcctgctccccaggagaggatcccgccccagggcctgcagccccagtccaggaggccagatgtctcagccccattcctggtatggcctccctcccagctcccagcttcctgcctggcttccccttgttgacaggcgttgctccttctcctgggcctctgtctggcggtctggctctgtctgtcttatccttggcttcctatatctctctggtctcctatttctaggtctatacgtgtgtctctctttggacctctgtctgtctgactcttctttgagtctgggggctccctgtgccttcctgggtttgtccctctctggacttcagtcctcgtctgagctttcagcccaccctctttctgttttggctgccagctggcatcctgtgtctctgagccagccttggcctctctttggccctcctactcccactctttagatggacttgctgcccccatgccagcctcccagccccaccctgtgcatatcaggtgttctgttcttttaagacagtgggcagttgccaagcaccaggtctcctacttccttcttggggagtgttgggaggttgtccaggccagggagccccctcatgctctttgacaaattaactgcctactactgtccctgaaatctgctgagaagtgctgagatccatcctgcagacccatccaccatccaagcacctgttcccaagacaggcaggaaagcgggggctgtatggaccaagctaggagatccggctgtagggggcggcaggaaagaagcttcagtgcccacccacctgccagagggcatgacccaggtcatcctacctccccctttaccccttgcctttcatttgatgccagcttcattgaaaggagtcccagatatagtgcaccccaatgggtagggcctcagagacgaggcagtacccaccaactatgcttgggcaggtggggaaaaagaggggccaaaggggttaagcctgggtctcctgactccccagatccagatactgcccaccataatttccattttgtttcaaacagtgaaccctatctccaccagcagaagccagctccctcctcatccctctgccaggcccagggctgagcagtcctggggcaggtgggtgaggaaggcagatgtggatgcaggcacaggcaaggatgagcccagggaggtactgagtctggggaagccaaggggcagggacaactcagtggttcatgggggctgataagggaggatcaggtaggtttctcactggaggtgacatttgagctgaagtatgaggaatgagtagatttcagaatagtcaaagaaaggaaaaggcaattccacctgaaacagctgcatgagcaaagaccaggaagagtgaaagtgcatgaactccgagtggctagttgaggctggagctgacaccagagtccaggcttagcagaagggtgccgtggacgacaggcccagcttgaatgccaggctgagaagctggggctctacgcgggccagtaaagagtcaagaaggcatttagagcaggggagggaaaatgttggatctaggtgtcagagacccctggagaccgccctggaaaggcaggagttgggaagaagatggcttggggaagaggaggagaggaggaagagcttgtgaaggtgcaggagtgagtcttggtaactgtagaagagaccccagctcccccagcttagcagcccccagcaccaggagctgcgaggcgtcaggctgcctcctggcggcaggcggcggcgggacagcaggcgcgcgcatgcgcggcagagggggttggggggtacgtcccggagcccccggtgcccgggtattaatggctccattagtggccgggagggaggcgcattagcggcggcgacggcgtctggctcccattaccaccggcggcagcggctgcaccgcaggcggctggaccctagcccgccgcgccgcctcctccacccccaccctatcccctgttcccgctccccacgagggcccgggcagggaactcccgtccccctatttcagcggaaaagctgattgtgaagccagatagatttgggttcaaatcccggccgtgccacctcgcggctgcaagatgctatcccccctctgagcctgtttcttgcgaagtagtcggggaaaccgggtgctccgggggctgtgtagaagcggactggcacccagcgagggccgcgcccagcccccgctggcacctaggggtgtgggttcccgcgcgcccctgggtgcagacctcctgtgtcgggcctccgtccttctcattggctgccgtctcgcccgctgaccgctgattggccgagacctgcttctccgcccctgagcgattaacccctgcgctgccgcgtcctcgggctgggtggggtaccctccctcccaccgcagacagctcgggtgccagctggccggcgccccgccgcggcccgcgtgggtgtcaggccggccgggcacccgtccgccctccctgcacaaagcggctttgtggagcctgccgggggttggctgggggccaggcggcgagtggaaaatctcgtgagcgcggggaggggaggggaacgcagggcggcgccccctcctctgctcgggccttggcgcctccctcagcccgcgccgaccaaccctcccagcccaagcgcctgtacacccctttcccgcccccgcaccttcccttccccaaacccacgtctctcaacccccccacccccgcatcccacccatctcccaatccctggggaccatcccccacacactctccccagtctctcttttcctcctggtccccctgcctaccccagccccactcacactgactcaccccggcgctatttttagccccccatccttgccgagccgcgccagcccaatcctgggctcgttccccaggcaaccctggccgtcgccgacgccgcccggggtgggtgggtgggtgtgtatgtggaaagcgggtgaggggagctggggacaccggggtggtgagctgaggcggggacccgggcctggagagcagggtggggagccgcaggcggccggcaggggtgcggtgcctcgcgggctcaataaatgggccccatgagtttagagtgcgcgtctgcctgtccctcggtctgtcagcatccctggctgctcgccccaggcctctgggcaggcctcagcctgtaccgcccgcccgggtggctgttgatgtcttcgtctgggttccctgtccccaggcctgggtgtggtggcacagtgggggctgtttaggggcagtccttctgtggagttggttaggggttggtgcagggggtggctgccatcacagtcctgctcagtacctttttccaactagggaggccccaattagggttggggatggcaagagagtgggagctgtctagggataggacctgctccctcccctctgctcctaatccacccccacccagggttcctccaccctgaacaatagaagctaagtatagggctggcccagcgcccagggcaggggggcccttcccgcccggattcccgcccctccctgccaggctaggcccccacttggttgtaccctgccccggacggggcctcttcccatctctcctccgtgggcactgtgtattctaccagatgtgcacccctcccagatgtgtggggccctctttccctcctgtgccatgcctggctctttttctcaaccaacagaagtcggggatctggggggcagagctcctctgagctctgtccttggactgcattgcagtagagaaggggttaacttgccagtaggtgactcactcaccggtggggagaggagggggcagtggtaggggcagtggtggggagatagcaggccacattgatttcagcctcaattcgtgcctcacattgcagtccctggggcagtgaagtaatggagggtctgagtctggggctgcataggaaggagggggcagtcacctaatagtccctctggttgcccctccaggctcacagccaagtgtctggccctgcagtctctggaggtcagagggctacagaccttcccttcccttttgggctcaggttacccagtttttgccccctctccattccttcagctctgtcagtggatgaggcaggttggggaaagggctcgtctgctcctgttgaccatccaacctgtgtaagagcccagtcttggtccatctgagcctgtgcaacctttacgtgcccaagtgtgtgaccccagtcctgtgcctttactgggtatggctccagggcccctcttgggtgatccagggcctctgggtctctgccagatgggctccacatccttgcctgtgtctttgtgtgagcccccctcgcctttctgtggtccacgtggctctgtatcattgtctaactatattccccagcctctgtttggagttccctccctgggtccaccctgaggttaagccttgagtaatggaaacagcacttgagttagagctctgggctggtacatcttgactgcatgatcttgccacagtttattcaatctctgaggctcattttttcacctgaacaatgggtgtaataaagcatacctccctaggtggctgtgaggattcaatgaaccagataatacatacaagctcccagcacacagcagccccagtaagtgttagtttcctttcttcctggccctttttttctgggagggggggcggggttagtgggtggctggcagagcagtgtggtggggccagccatggtgtgctctgtggttccctgccttatactgctagacagagggtccagagtggccaatgagtgtcagggtgggtggctgaatgatggcggtggccactgagctctgtatacctgatgggcctgggtactgaagcaggtagcacccattagggtaggattatatagagggtggggtcggtatgatggtgtctgtgagagctgagtgtgcactggggataggaggcgctttgtgagtgctaggaaggctgtgtgtgtgacggaggagtgtgtggttgtgtgggaggggtgtggagtgtgtgtagtggacaagcagggctatgctgagttcctcctgtttgacatgttgtctgtttgcatgattcatgtgggctggtgggggtgtgatgaggatgcgggttggcgaagcatgtgtgacagggcatggatgagatgggtgatgtgaacaggatgggtgaatgcacgatggtgggtggggagcgatggaccgtgagcgtgtgaggttgtacatctgtgtgagcaggtatgtgaggtgtgacagcgtgggtgtaagacagagggcatatgtgcccgtggggtgtgtaggagataatgggtgtggcacgaaagtgtgtctgtatgtctgtgaggagtgtgagtgtgagtaggtgagggctcaggatgcctcgcccagccctacgcgcagtttgtctgcccagcggggccaggcgcgcccaggcgggtgtgcgggaggcgggccgagccgcgcgtgagcgtgttcctcgcgcggactggacacacaacagcaccacgcacaacccagagacctccgcagcgcggcgccccgaaccgcccccctggctcggtgcctttactgcagtgcgccctccctgccaccctcctaccgcggccccgcccccggccggctcggggccaaccggagcccgccccgccctgcccttatttgcatatgactgacgttcccccggggcggccaatgggggcgggcgcggcggggcctgacccgcgcgcggcggcggcagccaatgggctcacgcgcggggggccgggcttgcgcggaaggccgcgggggaagcggggaaggggcggggggaggcgcggcggggggaggggagcgcgtagtagtggcggggcggggaggcggtggtggttcggcgcggggctcgctcggagcgcacggacgcacgcacgctggtccgtctgcccgcccggggccggaggtcgacccggcgctgagcctcgggcccggggcccggaaaggcggggcggcggcgccggcagccgggacgcgcggggccagagccgttacccgccggagctgcgagggagggagggaacgagcgagccagcgagcggggaagggagggggccgcccccgcgcacgcgcgtcgcgccccgccccgcctgccccgcctgccccgcccgccggactccgcgagggaggagggagagggagggggcggtgccgatggcccccgtgccgcgcgccccgtgacggcccccgcgcgcgccggggggcggggcggggccggtgcgcgctgacctcccccgccccccgggcggcgggaggcaggcggcgctgtgcgcaggcgcgcccggcagagacccccgcgtggggcggccggaggggggcggcgggggggggggcatgcggcgacggcctcccgctccccccgggcccaagcggcgacggccgaggagcgggctgcgggcggagcggcgtcggccgctgaggaggtgcgagcccctgccgggtcccccctgcgccggaccatgtattcggcccacaggcccctgatgcccgcgtccagcgcggcctcccgtggcctcggcatgttcggtcagtagcgcctgggccctgggactgcaggggtcaaggtgtcggggtgctaagtgcggagtaacggtggtgggggtatagtaggggagagaacagtagaggcagagtaaagggatgacggggaaagttacggagctcggccgggccgagtggttagtgatggcaggtgggagtgtagcggagtggggcgtatctggggacagctgtgatgttaaagtgatgggatggcacaggtccgctgtaatagaaaggtgaggggtgcagagtaactggctctggagcatggggtagaataggaacagcacgagacctgctggtcctaggggaggaggcttggattgggtagtggggctaaggacagggctcaggaagcgagtgaggcactgttagctgagatcagagtgacaggctgcagtgtgtggtgtagtttgcagagagcgcgacacctaagaacctggagggttgtgcactggggaggggttcaggagggagcaggaccaaaggactgccctccattgtctgctgggtcccttttccccaccccccagaaaagaggaggccttgatgggaaagatctttgcaaagagaggcacaggtctaagtccctggaggcttttatatggggttggagggcccagcgggttttcaggggtaagggacagggtcatcgtagtcttgagtgctcttcagtgctgtcttcgtgatcccagtcccttgtttcctgaggtctactttttcctttgtcagcccctctcagaatcaggtctcgaggccagtgcctcgcacagagctcccccctgtccaggcttctgaaggcatggggaggtcacctcaggtcaggttgatccggatcaagggaaggcctggaatgatggagagcagggctagggcggttccctcctcccttcttcatcttccccgagcaggggcctctctcctctgctggttccacttcccccagggagccaggcagtgtgaggggaagcccactggtatcctaggcccgccccaaaagtccagccaggggtaggtcccagcctagggcttgctcttccaccacccacctcttggggctgaaggttggacccctgggaccagcctcttggtgaggaagcatcttcctgtgcatatcctcaaggaaacacctggcacttgtgccctctctgggtagagacttgttacaattctctcttctggcccattgtccgtggtttttcttccaaggagtttaccacaccctcccctgttttgggcaagggggctggaccctggactacagataagccgaggggctgatggggaagggaggctgggaggccgatttctggatggtgcattgtctttgtgggggcaaaggagagagctgctggagccacctgtgcccagccaggaagggcaggtctggcactctgtgtttgtggtgggggaggaaggcaaggagcaggacctctcccacaccacagttgtaagagaccccacagcctgtgcatagtgaacggagagttggaggggaggggacgtggggccgtatgcctcaggaaagggaaagagagcatgaggccaaggtgagacgctgtgttgggcggcgactgggctgctgggaatgtggcatgacgggggtgggggtcccagcccgtagaggtctggggccttgggagtgtgggatggcagccaagcatgacctggtttgtggcaggagcaaatcgttcctctggcctggtccctggtggcagggctggtggagattggtggggggaggagtggggcgtgagtactatttcccttccctgcttctgttttcttttttataaatctagaaacctttcagggaggagtttttcctgagtgacgttgcatggacgagtccaagaggctctggtgttgggggtggggggtagacaaaaggggtggggctacctcatctagggtggggaagagcttgagttggggttggggccaggctctcctgctgcacagctcacctggctcctttccacagtgtggacgaatgtggaacctcgctctgtggctgtgttcccttggcactccttagtccccttcctggcacccagccagcctgacccctccgtgcagccgagcgaggcccagcaacctgccagccacccagtggcctccaaccagagcaaaggtgagggctggtggggactggggggaggcaagggtgtggggtccaggtggcctaggagccctctgatctacctctgtgtccccagaacctgctgagtcggcagctgttgctcatgaacggccaccaggtgggacagggagtgctgaccctgagcggccccctggagccacatgccctgagagcccaggacccggacccccacaccctttgggggtggtggaatctggtaagggtccgcctcccaccacggaggaggaggcctccggccccccaggagagccccggctggacagtgagacagagagtgaccatgatgatgcgtgagttccctgaggcctgggacttgggggtgggatggccagagacatggccctcactgtccctgctgccccgccgcagcttcctctccatcatgtctcctgagatccagttgcctctaccgcccggaaaacgtcggacccagtccctcagtgccctacccaaggaacgggactcatcttctgagaaggatggacgcagccccaacaaggtactttatccctgcctgtcctgtgctcaccccgtggccacccacacctgtctgccaggtcctaactgtcccgctctgggctgtgtttaatgcagcgggagaaggaccacatccggcggcccatgaatgccttcatgatcttcagcaagcggcaccgggccctggtccaccagcgtcatcccaaccaggacaaccggaccgtcagcaagatcctgggcgagtggtggtatgccctggggcccaaggagaagcagaagtaccacgacctggccttccaggtaacgctgttgcctcttggctcctcccagcttcttctggtggggtgggtgagtgaagggttgccctgccctctcctgccaggtgaaggaggcccacttcaaggcccacccagattggaagtggtgcaacaaggaccgaaagaagtccagctcagaggccaagcccacgagcctggggctggcaggagggcacaaggagacgcgggagcggagcatgtcggagacgggcactgctgctgcccctgggggttagtcagccccttggctctcccaccctgccacctccctccccgagagccaccagctacccccttgcttgctcctcccctgccccagcagctcctctctgctctatcgctttaatttggcgacccttatccgtaaaggaaccggcagttgattcatgtgacggagccagggagatccacacagatactaagattcccaaacagcaatctcgttatcaactgttgtttaacgagtgtttactatgtgcctggcactacagggaatataagctgtagtctgcaaaaccccattctatttctagaagaagaaactgaggttcagagaggcaaaatcacttgcttaaagtcataaacaagcaaatgacagagccagaatgtaaaccccagttcggcgggcccccagcaccatagttggggccactgcagctcgcaaacacccctgatgggctgcttccacttattgaggttgtctggtgtgcctggcggtgttctggggcacatttttggagtgagcctatgggtatggcagttctgtgaggttagatggatagttgctatggatatgcacttctatgagagtggggacactagttacttcctctttgagatgagggaaccgaggctcaggccagcggttggctagccagcaccacatgaacctctctccaggcctccttactttcaggagggctgccccccagggaatgggcctgctgcaaccccagagggcaggaatcagcaggaatgagatgctggactggtggtgggtggtggtttttttttttcaccaagtggcccagaaattccagcctgcttctgcctagtacctagaaatatctatgggttgttgggccagtctaggtgctggtgacaggcttactgactgtcatagcgccactctctactttacagtgtcctctgagctcctgtccgttgcagcccagacactcctgagctcagacaccaaggctccggggagcagctcctgtggggcagaacggctacacacagttgggggacctggctcagcccggccccgagctttctcccacagcggggtacacagcctggacggcggagaagtagacagtcaggcgctacaggaactgacgcaggtctagggtgcaggccccctagtgggggtgggcagggaacctgtccagggcagcagccccgctgaaccctctctgccacctatcctgcagatggtgtctggccctgcatcgtactctggcccaaagccttctacccagtatggagctccaggaccctttgcagcccctggtgagggaggtgccttggcggccactgggcggcccccgctgctgcccacccgagcttctcgttctcagcgtgcggccagtgaggacatgacgagtgatgaggagcgcatggtcatctgtgaggaggaaggggatgatgatgtcattggtgagcattgcagggcccagaatcttgcccaggacccagcaggccaaggctcagagggtgggcagaacttggatccaggcccctaggcccctttgttttcttttccacttggtttatggttgcatgtggccagttcaggccctgccgagtaaatccagccctgccctcaggaagcccccagccctgcaggaaatctggaggacagggggcatgaccagatcttcaggtgcagtgttaggggctctgtcctgcaggctcataggctcctgcactgggcagtgggcactgggcatgtgggcacagccctgggctgaggagtagccttcctggacagcactccctgccggtttggagcagagctgagatccaggctccagactgtttctcctgggtccccctgcatctagccccctccccatactgttccctccactccctcagctgacgatggcttcggcaccactgacattgatctcaagtgcaaggagcgggtgaccgacagcgagagtggggacagctctggggaggacccagagggcaacaaggtgagggcttgggtcacggtgctgtcccatcacactccctcctaagccatgggaatgtctgtttctcccgggcttgagagagggggagattaaggtccagagagggcaagctgcttgccccgtggggagttgggtcatagtcaggatgaattgaggccttcagctggcaggggtgcagccctaggctggcctggctgacaggctggatgggcatggctagggggctgctatcgaggtgtcggagtgtcctgacctggggtgtctcccttcctttcatgcagggctttggtcggaaggtgttttcacctgtgatccgttcctcctttacccactgccgccccccactggaccctgagcccccagggcccccggatcctcctgtagcctttggcaaaggctatggttccgccccatcctcctctgcgtcctcgcctgcttcctcctcagcctcggcagccacctccttctcactgggctcaggaaccttcaaggcccaggagtctggtcagggcagcacagcgggccccctacggcccccaccccctggggctgggggtccagcgacaccttccaaggcaacccggttcctcccaatggatcctgccaccttccggcgcaagagacccgaaagtgtgggtggcctggagccaccaggcccctcagtcatcgcggcccctcccagcggaggaggaaacatcctgcagacactggtgctgcccccaaacaaggaggagcaagagggcggcggagccagagtgccctccgcccccgccccatcactggcctatggggccccagcagctcccctgtcccgtcctgccgccaccatggtcaccaatgtggtgcggcctgtcagcagcactcctgtgcccatcgcctctaagcccttccccacctctggccgggctgaggcgtctccaaatgacacagcaggtgccaggactgaaatgggcactgggtctcgggtgcctgggggctccccgctgggtgtcagcttagtgtattcggacaagaagtcggcagcagccacctcaccagccccacacttggtggctggacccctgctgggcactgtggggaaggcgcctgccactgtcactaacctactggtgggcaccccggggtatggggcccctgcgccccctgctgtccagttcattgcccagggggcccctggtggtgggaccactgcgggctcaggagcaggtgctgggagtggccccaatgggccagtacccctgggcatcctgcaaccaggtgccctgggcaaggctgggggaatcacccaggtacagtacatcctgcccacgctgccccagcagcttcaggtggcacctgccccagcaccagcccctgggaccaaggcagcggctcccagcggccctgcacccaccaccagcatccgtttcaccctcccaccgggcacttccaccaacggcaaagtcctggctgccactgcacccactcctggcatccccatcctgcagtctgtaccctccgccccaccccccaaaggtgagacctgggccgggcagcactaggggaggggccatagtcctgtttggctcccttgtaaccttttcctttcttgcctcttaacttccagcccagtcagtttctcccgtgcaggccccgcccccgggtggctcagcccagctgctgcctgggaaggtcctagtgcctctggccgcccctagcatgtcagtgcggggtggaggggccggccagccactgccactggtgagcccgcccttctcagtacctgtgcagaatggtgcccagccccccagcaaggtgagggcctgcctttctctctacctgctggatgttggcccctgtaccccatcatttctttgtcttttttttcagtcttttctccttctccatgtatctggttctctgtcttgccatcttccgtgatgtctctgtgcatcctgactctctcaagtcctcagtgtctgtaccctcctccttctctgtgtccccacctctcactgtcatcttgcccatcctgttctcaccccaagttctgtgttccttgcttttgcttagagtcccacttgaggtcttggtcttcccctgccccagtctggggccacagctcaccctggcctatgggtgcccttctccacagatcatccagctgaccccggtgcctgtgagcacacccagcggcctggtgccgcccctgagcccagccacactccctggacccacctctcagcctcagaaggtcctgttgccctcctccaccaggtaattgcagctgagcccatactcagaggccagggaaggggtggggcggggccggcttacctcactcctccccatttcctctcctgcggcagaatcacctatgtgcagtcagcgggcgggcacgcgctgcccctgggtaccagccctgcgtccagccaggctggaacagtcacctcgtacgggcccacgagctctgtagctctaggcttcacctcgctggggcccagcggccccgccttcgtgcagcccctgctctcaggtgaggggcggcctggcaggcagtgctggggacccagggtggggctgaggcagtccgggccctaacttggtctcctgcttcttcttctctgtctttcagcaggccaagccccactgctggctcccggtcaggtgggcgtgtcacctgtgcccagtccccagctgccgcctgcctgtgcagcccccggaggtcctgtcataacagcattttactctggcagccctgcacccacctcctcagcacccctggcccagccatcccaggcccccccaagcctggtctacactgtggccaccagcacaaccccacctgcagccaccattctgcccaagggcccgccagcccctgccactgccaccccagccccgactagccctttccccagcgccacaggtaggtgtcagatcaacccagagcagagtgagttgggggacccaggggatgggctccagtcaggcctggctcagcaaacaattttctccccactagcaggttccatgacctacagcttagtggcccccaaggcccagcggcccagcccgaaggccccccagaaagtgaaggcagccatcgccagcattcccgtggggtcctttgaggcaggtgcctctgggcggcctggccctgcaccccggcagcctctggagcctggcccagtccgagagccaactgccccagagtctgagcttgaggggcagcccacaccaccagcccctccacccctgccagagacctggactcccacggcccggagcagccccccactgcccccacctgctgaggagcggaccagcgccaagggccctgagaccatggtgagcgcctgcaggccgtggggctcccactgccacttggctgtgcctctccattgacgtctttgcttttctgtcctactcttctttccatgcctgtgtgtctctcaggttaaagggtcccctctgtcccttctgcctgcctgtgttgtctcctctcccatctgaggcccctgtcttggccttcctgaggccgtgtgacagccttctcaaggggtctgctgggcgggctcagatccaactctttgtttctggcctttgccccagagtctgagctcagtgttcgccatctccctgcccatctccaccccaggccagcaaattccccagctcatcttcagactggcgcgtccctgggcagggcctggagaatcgtggggagcctcccactcctcccagcccggccccagctccagctgtagcccctggtggcagcagcgagagcagcagtgggcgggcagccggggacaccccggagcgcaaggaggcggctggtactggcaagaaggtgaaggtgcggcccccgcccctgaagaagacctttgactctgtggacaagtgagcatgggctggggccttggtggagcgtgttagggtggcgggagtgggagcagctgcaggctgaggcgggggaggtgaccctgccggccctccagcagggtcctgtcagaagtggacttcgaagagcgctttgctgagttgcctgagtttcggcctgaggaggtgctgccctcccccaccctgcagtctctggccacctcaccccgggccatcctgggctcttaccgcaagaagaggaagaactccacgggtaggcgagcattgggcacccagggtccttaggtggagggcagactggggccacctgcactgagtctgcttctgtttggccagacctggattcagcacccgaggaccccacctcgcccaagcgcaagatgagaagacgctccagctgcagctcggagcccaacacccccaagagtgccaagtgcgagggggacatcttcacctttgaccgtacaggtgccgtggtgggcagaactttgggggcctggggacctgcaagaggagtgggtctctggaaggcggttagagagtgagagaggtagggtgggtccatccaggctgggaggaagcacagcctgtcagtggtgggttctggagtctggcaggcccctaggttgccctgtgactgtgggcaggacccctctctgactcccctgtgaaatagaatgcagtgagggcttgggtgggcactcagacggtggcaggaaggccctgccgctgctgcagccttgccatgctgcctgtgccctgcacaggtacagaagccgaggacgtgcttggggagctagagtatgacaaggtgccatactcctccctgcggcgcaccctggaccagcgccgggccctggtcatgcagctctttcaggaccatggcttcttcccgtcaggtgagcctgtctcggagtcttggggtcactcgggtgggacttatctgtacatctcatcctgtgctccccaccgtttttctatctccagcccaggccacagccgccttccaggcccgctatgcagacatctttccctccaaggtttgtctgcagttgaagatccgtgaggtgcgccagaagatcatgcaggctgccactcccacggagcagccccctggagctgaggctcctctccctgtaccgccccccactggcaccgctgctgcccctgcccccactcccagccccgcagggggccctgaccccacctcacccagctcggactctggcacggcccaggctgccccgccactgcctccacccccagagtcggggcctggacagcctggctgggagggggctccccagccctcccccccacccccaggtccctccacagctgccacaggcaggtgagggacccctgagaagatgccaggacttatagtaccccctcaggacatggacagtatgtgggggcaggaaggttatctcctcccgggtaaagccatttcgtcctctccagtttggggcggaatgaggcctgctcctcttgtaaatacccccttccctcgaagctccctcccggtgctggggggcagctgaggggctgcaggggcagtctccctcctccaagcccctgtacataacctggagcgtgtgaccttcagagcttttcactttatgcaaaatggctcctgtgagggctgcaagctggagggtggtgcaggccttgggccacagggaggcgcctgtggaatagggggagttcatgcaccccttttttccccagaggggctggactcaggttagtttgggggtgggggctcctgcactttgccacaggcacggggagggttttctcctcaccccctctgccctcccaacttgggttgtactttctaagaaggtgattccccctgcccttgcccccttccccagaacaaaacatgttgatcatgtgcaatatttcttactgtgccgagaagccgcaatgagcgagattaaagctgtttaacacacctgtgtggctgtaggctcttaacagggagggctgttggttgtaccagtcctgtcctgagttgtcatggagcggtaggctttccatgaggtgggggcaacaattccagtaccactgcccccaacttcagaggaaccccataggccaggtccctgacttgctgtggaccagatggcccctctccagtttaggagcctgtgcgctccgggagcctcaatgcctgctggccctgttctcagccattggactgcgtgagtttggggaaggcctgaggcaagatgccactggatggtttaccctcactggctctggggtcattcgtactcaggaaacaggtcccaagaggtcctagcccagaggtggcagtgggtgggagggagcctagtctacctggaatacccttggtcctcagtgtgacccctgctgcccccatgtggcctgggcctgcactgcaactgggcttgaaggaacctcccctgggtgacacccctcctgctcagcatgtggacacagtgcccacctgaggtgacaagatacctacaccctgtgtggagggatgacaactaggagtgggagggtcaggacacctccacagaagtggcatctaagctagagatggagcaccaggaagttccagccagggcaaccgcatatgcactgggtcactatgttcccagaattcttgcctgagcttggtcctgtaggatagtgctggaaagctggtcttaactagtgtttactgattggtaacgcctgcctgaagcacactattgtgatagtggaaattaacctaaccacaagaatcacagtgccttaatggatcagtgatacctgccctgggcagaaatagaaccacagccaggcatggtggctcatgtctgtaatgccagcaccctgggaggccgaggcaggtggattgcttgagctcaggagtcagatcagcctgggcaacatggcaaaaccacttctctacaaaaaatacaataagctggacctagtggcacatgcttatagtagcagctattcaggaggctgaggtgggtggatcacttgagcctgggaggttgaagttgcagtgggctgtggtctcaccactgtactctagcctgggtgacggagagagaccctgtctcacacaaaaaacaccttgcagaactgcagggtcacagatcaggataaggactaatggtggtacccagatacccagacaggttcgaccataaagcaggaaacagcacactgaggaaggagagtttaatgttgtgggaaggcagcaggatgcttagggtgcgggctccagcaggggagcaccttggccctggtcttgggccagcagacgcagaagcagggagtgcagagcccggcaaacaggtgtgtagcccaggcggctcagatgcaggtaatcatacatgtcatgatggctgatggtgccatctgagtgcacaaagccagggtcggcatctaggaagtgggcccgagggtggccagccagtgccgcccgtaccagctcgttcacctgtcggttcttctcccgaagtgggttgggatgttggcctcgcggaagcaggccctgagcaggaacacgaggcgtagtaaggaaacaagcatttgagtatcttgttctctgtgccaacctgtcctccacccaccaccatgaagtttccagctgcagaaaacactagggatgggcaagtggggagggtgggagggtagttcctaaatatcacatcctagccctcatttagcaagagacttctgggttttaccctctttcgttttcttttttttttttttttgagacagagtcttgctctgtcgcccagactggagtgcagtggcgcgatctcgactcactgcaagctccgcctcccaggttcacgccattctcctgcctcagcctcccaagtagctgggactacgggcacccaccatcatgcccggctaattttttgtatttttattagagacggggtttcaccgtgttagccaggatggtctcgatctcctgacttcatgatccgcccgcctcggcctcccaaagtgctgggattacaggcgtgagccaccatgcgcggcctagcctctttccaagtatcacttagaaaaatgttgacattggctaggttcagtggctcacgcctgtaatcccagcatgatgggaggcagagctggataggtcgcttgagcccaggagttcgagaccaacctgggcaacatggtgaaaccccatctctaacaaaaatacacaaaaattagtgggacatgatggcgtgtgcctgtagtcccagctactcgggaggctgacgtgggagaatcacttgagccctggaagcagaagttgcagtgagctgagatcatgccaccgcactccagcctgggcaacagagccagatcctgtctcaaaaaataaataggccaagggaggttgctcacgcctgtaatcccagcactttgggaggctgagacgggtggatcacttgaggtcaggagtttgaggccagcccggccaacatggtgaaatgccatctctactaaaaatacaaaaattagccaggtgtggtggcacgcgcctgcagtctcagctactgtgaaggctgaggcaggagaatcacttgaacccaggaggaggaggttgcagtgaggccagattgcgtcactgcactctggcctggcaacagagcaagactctgtcccaaaataaataaataaataaaagatatcaacatcatggctcatgccaagggatcaatccgttttcagaagaggaaatatcctagctacctacaagtgatggagcctagatttaccccaggaatgcctgacaacttttggcctattcaaggttttttgagggtttttcttttgttttctggtgagacagggtctctgtcacccgggcgagagtgcagtagcatgatcacagctcactgttaccttgaattcctgggctcaagtgatccttctcctttagcctcccaagtagctggggttacaggttttgcgcaccatcatacccagctaattctttttttttttgagatggagtcttgctctgttgcccaggctggagtgcagtggcacaatctcggctcactgcaagctccgccccccgggttcatgccattctcctgcctcagcctcccaagtagctgggactacagacgcctgccaccacgcccggctaattttttgtatttttagtagaaacggggtttcaccttgttagccaggatggtctcgatctcctgactttgtgatccaccctcttcagcctcccaaagtgctgggattacaagtttacaggcgtgagccaccgcacccggcttttttttttttttgagacagagtttcgctcctgttgcccaggctggagtgcaatggtgcaatcttggctcaccccaacctccacctcctgggttcaagcgattctcctgccttagcctcccaagtagctgggattataggcatgtgccaccacgcccagctaattttgtatttttagtagagatggagtttctccacgtgtggtcaggctggtcttgaactcccgacctcaggtgatctgcttgcctcggcctcccaaagtgctgggattacaggcatgagccactgcgcccagcccatgcccaactaatttttttttttttgagacggagtctcgctctgtcgcccaggctggagtgcagtggcacagtatcagcttactgcaagctccgcctcccaggttcatgccattctcctgcctcagcctgccaagttagctgggactacaggtgcccgccaccacgcccggctaatttttttttgtatttttagtagaaatggggtttcaccgtgttagccaggatggtcttgatctcctgacctcgtgatccacctgcctcggtctcccaaagtgctgggattacaggcgtgagccaccgtgcctggcccgttttttagtttttcaatacccccaaagtcttaagccatccctgggcaaaaaaggctaattggtctcggagcatattctcaaccacagccactctgaagggtatagcaagctccaacgtgagattctgcctaaaagccactgctctatgtcaagctgcctagaactgtgccaactgtggctatatctgagggggtcccagaccactgccattcttcctttcccactctcccagcctctcaccagcaccacaacccgggcctggggctgtcgctcattcaccagttgcacaatggccttgatgccaccagtcacctgctctgctgtgtgtccgtggttgttggtgcccacccagaccaccacaatctgtggaaaaagagacatgaagcagcggtgagggggcagccaaaagatgttttagagccccacccaagccccgctcaccttgggccggatgtgttccagctccccattctccagccgccacagtacatgctgtgtgccgtcaccaccaatgccaaagttaagtgcatgcagaggagagaagagctcgcgccagatctgtgggcaagaagtggtgtgggcaagaagtggtaggggcacaagggcactgtccgcatggaccatccccctctgtccaggtgttaaccaaatgccattatggaagaaccttacttcatggaagcagtcttaaaattttacctggagcaaactccagcatggctgaacctcactttatagaaatctattagagtctctcacttattttattttattttatatttttgagacagagttattttatttttgagacagagtctcactctgtcacccaggctggagtgcactggcactatctcggctcactgcaacctccgcctccctagttcaagtgattctcatgtctcagcctcctgagtagctgggactacaggtgtacgccaccacgtccagctaattttttgtatttttagtagagatggggtttcaccatgtgggccagactggtctcgaactcctgacctcaggtgatccacctgcctcggcctcccaaagtggtgggattacaggcgtgagcccatggtgcccagcctatttattttttgagacggagttttgctcttgttgcccaggctggagtgcagtagtgcgatctcggctcattgcaatctctgcttcccaggttctggcgattctcctgcctcagcctgccaagtagctgggactataggcatgtgccaccatgcccagctaatttttgtatttttagtagagacaggatttcgccatgttggccagggtggtctcgaactcctggcctcaggtcatccgcctgccttggcctcccaaagtgctgggattacaggcgtaagccaccacaccctgcctagagtctctcactttaaaccaagccccaggctctgttgctcatgctgaggtgggcggactgcttgagcccaggagttcaagaccaacctgcgcaacagggcaaaaccccatctctacaaaaattacaaaaattagccaggtgcatggtgatgtgcacctgtagtcccagctactcggagactaaggtgggaggatcacttgagcccaggaggcagaggttgcagtgaacagagatcataccactgcacgccagcctgggtgacagagcaagaccctgtctcaaaaaccaaccaaccaaccaaccaaccaacaaaacaaaccaagccccatagaagcaagactcacttcatgaaaatccagtctgcttgagccatgcattgaatcaatggcattacagttgaaacttattttgatgaaacccattacagttggacatgctttgtggaaagatattattatgattgagtcctctttgtggagtgccattagagttgcccttcgcttcctgtaaagtgactatagctttgtgtaaacccaacagggctgcgcactacttaaagcaaacaagaaagagcctcactttaggcaagcctatggcaggaaagcctcattttaggtcttagtacattatacacaaatccaatctgataaaaccaaggcatacatttctttctcaatagaatgttgcaccttacaccaagattctcagagcctcgggctgcctgaggccaatctgggtactctcataatacctcacctggcctgggttctggtccagatgtgtcagcatggacacagggctggatggggcagggggagagggactgccctcacctcgcactggtgcatgagctggaccaaggagtccccgatgaagacgacttcgggttccttatctttgctgtcagccacgaaccgatggtgctgcgggagcgcgcgagagggagtcaatggcatgcacgctccagggcccgccccgccctgctcccttaggcagcgcctcctcaactgccctcagtttcccaatcaggtagtgagagtggcacgaaccagccgttctcctgagccaccccccgcgcccccggactcctcaatatcccaggtgggaacgctcaccagggacatccagcgcccgtcgccctgtacgtcctgcaccggcgtgggcttgctggctgggttctcctctccactcatcttggcgccgcagctcctgcaggatgagcgagtcgggtcggcccgggagtgttccgaacggagctggctccgccacgcccactcctacccctcgcggcaacaaaggaccgtcccaacgctagcacacccgcggaggacgaaggccgatacagggcgccgcctcctctccagggacggaagccttcacttaggaggtaggtggaatcaggaaccttcgcttcccccacgacggccgcacagtgggctcgcccggcgcttcccgctcgggccgctgactcccaggccgcgcacccggcacggggtggggggagggagaggcgagaccatccagctcccgaggcggggaggagggagaaaccacccaccggtcacggggaggggcgaactacctgaagagtcgagagtgggcggggaaaatctagccctctgtctagcaaatgggaagaaaccatttgctgtacagagtgaaatgtgcggaagggaccacctactgttgcgggggggggggtgacccattcacgtggtggggggaggggagcgagtggacgagtccattcttatattcccttgaaggggtggctcgaatgcacctggctgggggggacgctcctattttctactgatgtgggggacagaaaaggaagatgacaaaatgtgaaaattcgaggctcccttctaaggagccactctaaggccgcgccagggctttagtgagcctatctactcgtgggcttcccctactcaaaacaccgtgggtgtgtgtgtgtgtgtgtgtgtgtgtgtgtgtgtgtgtgtgttgaaatctaaagtacatatctttgcattcaagacatcacaggacccctactcaaaacaccgtgtgtgtgtgcgcgcgcgtggcataacatataaactacatatctttgcattcaagacaccataggacctgcttggagggtagaagaaggtgcagaaagagaaaggaaattagagacgcctccagggctcaggtccagtctggcgtccctccggcagatcatcttgcagatctgcagcctctacactctctctaaacccacaggccaactgggtatgtctgagctctgaaacctacatccatagccaaggccacctagggtcgcgcctctcccccaacgctgccccaaattaatctcagacctcagtgtcttctcagatctccctcttctctgggaccaggtggggggctcactccctgctaaacgtcctggtcatgttcttgtagcctcactccaggtgggaccttcccatgtattcattccttcgaggtggattgatactgagacagagatgagtgttattcattgtgtttatgttttcaatccactttcctggaactgggccgggcacacagtggttattccacaagtgcttgctgaatgagtagtaaatgagtgggtcagctcctgaccttgtcccaatgtgtttagggagacagatccagacacagaggtgtaggggtgtcaaagttgtgtttgagggagagacagggacctctggggaggaagaggagaaggactctgaggactatgggtttcctaggagtagtatctcagctgggtctgaaagataatgaagaatgggcaagcagaaagaaaagacacaggtaatcactttcttattaggtttggggaatatcgtggaatagcttgattttaaagtctgagggaggccagcatggaggctcatgcctgtaatcccagcactttgggaggctgacatggtcggatcacttgaggtcaaccagcctggccaacatggcgaaaccacgtgtctactaaatatacaaaaaaaaaaaaaaaattagctaggcatggcagcacacgcccgtagtcccagctacttgggaaggctgaggcaggacaattgcttgagtctgggaggcagaggttgcagtgagctgagatcgcgccactgcagcccagcctgggcaacagtggcccagcttgggtgacacagcgagactctgtcttaattacaaaaataaacaaacaaataaagtctgagggagccaggtgcagtgatgcatgcctgtagtcccagctactggggaggctgaggtgcgaggatcgcttgaacccagaagtttgagaccagcctgggtaacacagtgagaccctgtctaaaaaaaaaaaaaaaaaaaggctgggcgcggtggctcacgcctgtaatcccagcactttgggaggccgaggtgggcagatcacgaggtcaggatcgagaccatcctggctaacacggtgaaaccccgtctctactaaaaatacaaaaaattagcggggcgtggtggcaggcgcctgttgtcccagctacttgggaggctgaggcaggagaatagcgtgaacctgggaggcagagcttgcagtgagccgagatggcaccagtgcacttcagcctgggagacagagcgagacgccgtctcaaaaaaaaaaaaaaaaaaaaaaagggcaagtgcctgtagtcccagttagttgggaggctgaggcaggaggatagcttgagcctgggagatgaggtggcagtggcccatgatggtgtcactgcactccaggttgggtgacagagtgagtccctgtctccaaaaaagaagtcataatcagctaggcacggtggctcactcctataatcccagcactttgggaggctgaggtgggcagatcacttggcgtcaggagttcaagaccagtctgaccaacatagcaaaaccccatctctattaaaaaatacaaagattagctgggcaaggtggtctgcgcctgtagtcccagctacctgggaggctgaggcaggagaatcgcttgaacccgggaggtggaggttgcagtgagttcagactgtgccactgcactccagcctcagtgacagatttaaattccatctcaaaaagaaaaggaaagaaaagaaaagaaaagaaaaaagtcttaattatgccttcaagtcagtgatataagagagaattttttttttttttgatagagtctcgctctgtcgcctaggctggactgcaatggcgcgatctcggctcactgcaacctctgcctcccaggttcaagcgattctcctgcctcagcctcctgagtagctgggactacaggcgtgtgccaccacgcccggctaattttttgtatttttaatagagaagaggtttcactgtgttagccaggatggtctcgatctcctgacctcgtgatctacctgccttggcctcccaaagtgctgggattacaggcgtgagccaccatacccaaccgagaaaaaaatttttaaaaataaagtcttagaggataagttggagcagttcctgaagcaaagcttagtgagaaacaaagcttccaggcattcttcattcaccaggcccatttcaagttagacatattggtctagtttatccttctagcaaccaaatgaggaaggtagttttattaccaacccaattttacaggtcagaaaactaagtctgaccagttacaaacatttccaaggtcacacagcccagttgtgccattttgggcatttaaaccaagcctagctatgaatcacaacactacactaacttttttttgagatggagtctttctctgtcacccaggctggaatgcagtggtgtgatctcggctcactgcatcctccacttcccaggttcaagcaattctcctgccccagcctgctgagtcgctgaatatacagtcgtgagccaatgcatgtggcctaatttttgttcttttacagggtcttgccgtctccctcaggcgggcgtgatcatggctcactgctgcctccacctcctaggcttaagtgatcctcctgcatcagcctcccaagtagctgggcccacaggcaagagccactgcgcccagcttatttatttatttagagacggagtctcgctctgtcgcccaggctgaaatgcatctcggctcactgcaagctccgcctcccgggttcacgccattctcctgcctcagcctcccgagtagttaggactacaggcgcccgccaccacgcccggctaattttttgtatttttagtagagacggggtttcaccgtgttagccaggatggtcttgatctcctgacctcgtgatccgcccacctcggcctcccaaagtgctgggattacaggcgtgagccaccacgcccaaagctaatttattttttgtagtcagggtctccctatgttgtccagggtggtcttgaactcttgggctcaagccagcctcctgcctctgcctcccaaagtgctgggattacagacgtgagccaccacgcccggccaactgtataagttttctagggattatgtctgtggctgcttgggggacagctgtgcatgggggctaccatgacccttcttccctttggcacgcctggtctcaactagccctcgaaagaccgctgatagctatctgaaccaatcagcattcaggaagggggcggacctagtgaacctcacagccaattgagggctgggaggtgctgagaccaagaaagggagatttctgaaattgaggctgggaggggaggggctataaccggcgcttccctggcacgcgccgctaggtttccgtcctctcagagccacgaagccaaagggcatggaaagggcacgcgcatgcgtgtgggggagcccgaggcccggaacagcgccaggtgacttcgagagctggggtcaccgcggaaaagaagccattgcgccccacagctacgtgaagtgggaagggccggggttcgttggggcgagagaggtgcccttcccacaccctgctcctgccaaccgtaccccactcccttcactctgcccaccctgccctaccgcggctggccaccatgcttcctctcctaccctaggcccttcctttgtgatcaggccctgtccctgatcgcgcctctgtctcccttcctgttctcttgaggttttctcaggctttccagacttctcttgctgctctccctctcctgcttctctttctctactatctctttccactttctgcattcccctgtacctcgtctacccctggatttctccgtccagaatcactttctggtcccccaaatccctccaatctcatgaccccttcaccaccctccatcttttgttgttgttgttgttgttgttgttgttgagacagagtctcgttgtgtcccccaggctggagtgcagtggcgcgatctcggctcactgcaacctccgcctcccgatttcaagcgattctcctgcctcagcctctttgagtaggtgagattacagtcattcaccaccacgccggctaatttttgtatttttagtagaggcgaggtttcacatgttgcccaggctggtctcgaactcctgacctcaaatgatctacccacctcggcctcccaaagtgctgggactacaggcgtgagccactgcgcctggcccccaccctccatcttttttttttttttttttttttttttttgagatggagtctcgctcggtcatccaggctggagtgcagtggcgcgatctcggcccactgcaagctccgcctcctgggttcacgccattctcctgcctcagcctcccgagtagctgggactacaggcgcccgccaccgcgcccggctaatttttggtatttttagtagagatggggtttcaccgtgttagccaggatggtctccatctcctgacctggtgatccgcccgcctcggcctcccaaagtgctgggattacaggtgtgagtcaccgcgcccggctcaccctccatcttttaactgtttccccatgtccctgttcctaatagcctctctctgtttcctggcttatcttcccattagctgtgactccttcgacttcatcttacccctgtgattccttatctgaccaaaccttttccaatctctctctgctcacttattttctctcatcttctctctctcttttaagagacaaggtctcactctcttgcccaggctggggcacagtgatgcaatcatagctcagagtaacctccaactcctgggctcaagtgatcctcctacctcagcttccctagcagctgggactacaggtgtgggccaccgaatccagcttttttttttttttttttttttttttgagatagagtctcactctgtcactcaggttgaagcgcagtggcgcaatctcggcttactgcaacctccgtctcctgggttcaagcgattctcctgcctcagcctccagagtagctgggattacaggcgcgcaccatcacatacagctaatttttgtatttttagtagagacaggatttcggcatgttggccaggctggtctcgaactcctggcctcaagtgatctgctcgccttggcctcccaaagtgctgggattacaggcatgagtcaccacacctggcatcatccagctaatttttatttttattttttgtagagatgagggtctcactttgctgctcaggttggtcttgaattcctagcctcaagcgatactcccgcctcagcctcccaaagtgctaggattacagatttgagccaccatgcctggcctcatctggtcattctaaatagtattcccaccacaccccaaaacatctccctattcacttgttttgttttgttttgtttttgagatggagtctcactctattgcccagactgaagtgcagtggcacaatcgtgactcactgcaacttctgccttctgggttcaagcaattctcctgcctcagcctcctgagtagctgggattacaggcgtgcaccaccatgcccagctaattttttttttttttgagatggagtcttgctctgttgcccaggctggagtgcaatggcatgatctcagctcaccgcaacctccacctcctgggttcaagtgattctcctgcctcagcctcttgagtagctggaattacaggtgcatgccaccacgtctggctaatttttgtatttttagtagagatggggtttcactatgttggccaggctggtctcgaactcctgacctcaggtaatctgcctgccttggcctcccaaagtactaggattataggtatgggccactgcggctggccaatttttgtattttcagtaaagacagcattttgccatgttggctaggctggtctaaagtgacctggcctaagtgatcggcctgccttggcctaccccagtgttggtattacaggcataagccaccgcgcccagccctccctattcactttgctactccccttgacttatctgcatgctgatggccaccctatctttatattccaggacaccatggatacccagggaccagtctcccagccttttcagcagcctgagaaacctggtcgtgtccgtcgtcggaagactaggcgggaacgtaacaaggccctggtgggcagccgccggccattagcccaccacgatcctcctgtggccattcgggatccacctgtggtccctactgcctccaagctcgtggtcataacccagggccggctgagccgggagcaccggggtctcttcaaccacgaggtgaaatccctagatgttgcaaggctgcttagcagtgggaccctggtgccaggcagccccacactccccgccaagccctccccaagcccaggcagggcccaggaaccagccccacggtccagggacaaagagaaccaggtgcctggaggttcgggcccaggcccacccagttccccagagttgtctggcgtggggcagctgctggcagagctgcagtgtcagctgagtttgccacaggccttcccccggaggaacctgattcaggatgccagggatgccatcgtgcacaccttgcaggcctgtcatggttgtgtgcctgaccttgccctggtgcttcggggctgccagccacccttgccaggtgagcgtccctcctgcccctgtactcccctttcctttgtcggctctagctcagctagcctctatgcttctttcctctgtgccaggggccaagcctggggtctctgagagaaagatgacacccttctggattaatagccctgatcaagtcccagagcaggagaggcaaaggaagcaacaagggacaaaggagttcaccttccccatgccctacacctccagcatgcccactgcgcacagggggagtctggcaccgccaagaggtccctggccaccatactttccctcactgtcttcgccatctggaacagcctggggtcccccaacagcgtttgacttgttaaaaagcatctggctggtagccacgccaccccctcctcggccctggggggttggcctccctcagcccctgcctcagccttcatcacccctgttgccccgaacctctgtcctggactggagccccagccccccttccccactgcccagcctctcctgggtagtagcccagagcagtccggaagcctggtcttttccacccatgagactgtactgaggagaggctgaggctagggctggggacagatatcttgtactcccagtgacctcaataaagtacttttcatggtcctcttgattttcagtgagttgctgactcagaagagcagcttttcttagctctgagttctaggtccaagatggaggggaaggtactgttgcttgttaccttcatagggcctgaggagccagcatggtggggaaaattgggacttcaattagtccaacacatatgcccactgtggctaactgtgtacctgaccctgagctctggtgatgctggggctccagagtgagtgagacaaaggccttgtcctcatgaggctcccagtttggtggtcggcacacacaaccccagctccagtgattgtgtctaggagagcaagagaggtgcaggggctggggcagtccaaggagggagtgatggctgccctagtgaggagggaattcttcgtagaagagctgtgtttttctttctttctttctctctttctttctttcttttctttctttctttttccttccttccttccttccttccttcctttctttccttctttctttctttctttcttttttggagacagagtcttgttttcttgcccaggctagagtgcaatggcacaatcttggctcactgcaacctccgccacccaggttcaagcgattctcctgcctcagcctcccgaggagctgagattacaggtgtgcgccaccatacatggctaatttttgtattttaagcagagatggggtttcgccatgttggccaggctggtctcgaactcctggtctcaagtgatcctcctaccttggcctcccaaagagctgcaattacaggcatgagccaccgtgccctgcgaaccctctatttttcaagggtggtggaaacttggtacttgaggaaaagaacatttcaggcaaggggaacagcatatgcaagtcctggaggaggctgcatagcagatacagggccattttcactcagcaaatccctaggccatgctgggacctagagtaagccacatctgggcctgcccttgagcgcctcctggtctgtgaacacagggaacagtgtatgtgcaggctcagggcaggagtgacagatcagggctgaatctggcccacaggctttttttagtttcacccacgatatgttttaaatgttggaatcaattgcctactgttacaaaccaggcagtttgctttttttttttaaattgcatttctggcttctttcagaaggaaagaaaaaataaaaaaggatctggcagcagcactacaatccttcctggcaacaactggccaagtagcagaggccccctctttgtgggatccatgctctccattaaaaatgtttcacttatatttccagcttggccccttggcttagaaaatttgtaaaaaatggtattttgagcagcccccgttttctgcagtggagaaggatgaagctagaaatgtttgttggagtctgatcaggaaaatcaaggtgaagggcatggcttctactctggaaaagcctttctagggcttgctgttgtccactgggaaaccatagggttgatatctgcatagaggggactgggctaggagatcatagggctgaatgacttggcccaggtcttatggtggacaagtgaaaaagtaggggtcaggctgggatttgaatgaacccaagcaagttattttaacttggatctgaaacatgcttttggctatctcacactaccacctctgtctctcacagcaacccagcttcacagcatggtaagcagtgacaggtcatggtcaggcagaggggtacggtggttatactgaagcctccaccaccaccatgtggtgtaacaagtggcttcccctctctgtgcctccatgggcactttgcagggtgcatcagatctagaacgctggcaactccaggatggacacagctggggatggctgcaatagaggtggtgatgggcaatcaaagacttgttggccaggcgcggtggctcacgcctgtaatcctagcactctgggaggccgaggtgagcagatcactttaggttagaagtttgaaaccagcctggccaacatggtgaaaccctgtctctactaaaaatacgaaaaaatcatccgggcgtggtggtgggtgcctgtaatccctgctactcaggaggctgaggcaggagaatcgcttgaacctgggaggtggaggttgcagtgagccgaggtcgcgccactgcactccagcctgggtgacaaagcaagactcgtctcaaaaaataattagtttggggactacattgaggggaggccaggacagagcatgggtctggggatccggagaaggcagtctggaggaggcatggctttggaagacgtgagttcagtttaggacacaggaaaccataggtatctacgggactccaggaggggagggctggggcggggtgacagaggatgaacgtccccctcccacgcggagaagataggagtcaggttgggccctcttggaggagggggcagggagcgcggcgcccggcggcccctttaatcgggggcgcgcgctggccagcccgcgcgctctcgcctccattgccgggccagtgcgggagccggagcggagccggggccggagcgggcggaatggagcccctgcgcgcgcccgcgctgcgccgcctgctgccgccgctgctgctcctgctgctgtcactgcccccccgcgcccgggccaagtacgtgcggggcaacctcagttccaaggaggtgagcatgccgagccctcctctgcggcccgccggcccccgggggacgcaagggaggcgaggggagcgggtaccgcctcgccccctgccgcccctcctggcggactccgggagcctcgggggagtggggccgagggcgatgggggactgggccagagtcgaggctaaggggagccgtagggtcgcggccagacctgggggttgtaggagggacgttgaggtcagagctgagcggggagggggagcgggttgggagagtcagagtttgggaagggtggtgcagaggtggtgctgaagggacagcacttttcactcagcagagagccccgagctcgccgccacactcccgctcaggaccgggagggggccgtttggaagattcccccgcgcgggatggtctttgggagcacggggtggggtgcaggggagtgtggatattgggggaacggggttagatattggccaggacatgaggtggccaggatgagcatctggcccctaaggtctttctccccagaaagatcccgggaaatgcagggaggagtgtttgaatggaggggaggaaacttgggggggcaatggagggagaaaatcagggcggcaggaatcctggacccacagtgacgggatcagggaaggagtttggaggtgacctggtctccttctagtacttgggaagccaggtacctggggggtagggaagaaaagttgggggtctatggagtaaagagttcttgaaggactcagcggagggtcagactgggcccctttttcaggactgggtgttcctgacaagattttgtttcctctcggattacggccgactggacttccgtttccgctaccctgaggtgagtctcccccaacactcgccatgctgaggctgggtacttcccttggcctccaaaggcacaggctgccccagctcccggtccccaacatctctggtctgcaggccaagtgctgtcagaacatcctcctctattttgatgacccatcccagtggccagccgtgtacaaggcaggggacaaggtgagggctgtgaagagggcatagggggagaggggagaaggtcgttgctggccgggggagtgaccctgtccctgccttccccaggactgcctggccaaggagtcagtgatccggccggagaacaaccaggtcatcaacctcaccacccagtatgcctggtccggctgtcaggtgcaggctcagcctgggggagtgggcaggtgctgaaggatgaagccttcggggcatcaaggacaggcttcagccttctcgtttgtccccaggtggtatcagaggagggaacccgctacctgagctgctccagtggccgcagcttccgctcagtgcgtgaacggtggtggtatattgcgctcagcaagtgtggggtaaggggctggggtggccacctggaccaccttctctttgccttcctgccaacccccaacttgcccagggccccccttaggcctccctaccccccacagggtgatggattgcagctggagtatgagatggtcctcaccaatggcaagtccttctggacacgacacttctccgctgatgagtttggtgagcacgtggggacctagaaaccaggctctctgtgggacaccagagctgggtgcccactgaggggacatccacctgaatgaaccttactcctcctaccaaatcggcagggatcctggagacagatgtgaccttcctcctcatcttcatcctcatcttcttcctctcttgttactttggatgtgagtctggcacatggggtgtgggggaagagataggagggagcagggttgggggaggtgagctgctctccctttctgcctgtggacagcctttccctaccttgcttcctagatttgctgaaaggtcgtcagttgctccacacaacttataaaatgttcatggccgcagcaggagtagagggtgaggttccgtgtcccaacttttgggttctgaaagagaaggcacttggggccagacacctgggcctaagaggaatgcctgggggcctggactcctgggtcctgggggaggaggggctgggggcctggactcctgggtccaagggagaagggcctgggggcttcgactcctgggtcctgggggagaaggggctggagccctagttcctgggggaggatgggctggggacctggacccctggttcctgggggaggagggggtgggacctgacacccctgggtccttgagggagtataaaggccggaactaggctggacacggtggctcacacctgtaatcctagcacttggggaggccaaggtgggcggatcacgaggccaggagttcaagaccaacctgaccaacatggtgaaaccctgtctccactaaaaatacaaaaattagctggacatggtggcgtgtgcgtgtaatcccagctactcaggaggctgaggcaggagaattgcttgaacccgggaggtggagattgcagtgagccgagatcacgccactgcattccaacctgggtgacagagagagactctgtctcaaaaaacaaaacaaaacaaaacaaaacaataaaggcctgaactcctgagtctgggggaggaggggctgggagcctggactcctgggtctgagggaggaggagctgggggtctggacccctgggtcctggaggaggagggtctgggggcctgagcccctgggtctgaaggaggagggggtgggggcctggacccctgggtctgaggggggagggggtgagggcctggacccctgggtctgagggggtagggggtgggggcctgggcccctgggtccttggggagcagggttgggggctggactccagattctcctagcaggtgagtcggggtagaaggtctggagtcctaagggaggaggcgggattcagactgcctggatggtagtgctagagaacagtgatgccccagagctgctttctatcctttcttatctgcccatcctcccctcagtcctgagcctcctatttttctgcatctactggggtcaatatgccaccgatggcattggcaacgagagtgtgaagatcttgggtgagaatgaagctgggtggggagagggtggagcccagggctcaggttgggcatcaggtctgagcctggctctgagccgccccctcctcccttctcccagccaagctgctcttctcctccagcttcctcatcttcctgctgatgcttatcctcctggggaagggattcacggtgacacggtgcccgggcagggcgtgctcgtggggcggctggtgggggagcagggcaggggcagggttggggggctgggtgcatcctcctccctgacggcccccaccctgctgtctcccctcatggcctgctgccaggggccgcatcagccacgcgggctccgtgaagttgtctgtctacatgaccctgtacacgctcacccatgtggtgctgctcatctacgaggcggaagtgagtccgactggcccctggccgggccctgccttcccctgcttttggcgccgcctcccccttgacctgtctgctcgcccttgcccacatcctgctcctgctggctcgctctctctcccactcttcgattttctgctttcccatctgtctaagtgattcctcctctcttcaccatcccgcagcagctttctttctcctccctctgtctctcactgtctgtcacatttgtgctcaatatcgtgactaagagttcaggagtcacacagacctggattccacaccagctctcccacttcctagctgcctgaccttgggtgacgacccctgtctctgggcccattttcttcttggaaaattgggaggatcttacctaccccatggagcccctctaaggctttctatcgtctgtatggctttggccaaagggcttccctcttagccttagtttcctcttctgtgagatggagcagtaataagacctacctcgttgagtagatgctgatggaaaaactcacacatgagaggggtttagccctgtgttgagcaaacagtaactgatttattctcttcctgtctttttcaccctctctctctacctcaatatgcttctgtctccgtgcctggctctcctgttgcttgtgttctgaccgagtacctctgttcccaagtgcccaggggtggggtccggggaccctaatagaggggaggaggccaggctgtgatggaccctctcctgcgggtctagttctttgacccaggccaggtactgtacacgtatgagtcgccggccggctacgggctcattggactgcaggtggcggcctacgtgtggttctgctatgctgtgcttgtctcactgcgacactttcctgagaagcagcctttttatgtgcccttctttgctgcctataccctctggtgagaattggtgggccccagcctgtccctgcctccctctcggggctccccagaagtggttgccccccatctcagaccctccatagtgagggagatggacttttcactcaggcagctgttgcccagaatctgccacttactcactttgtgaaaaattactttcacaagaagtgcatcaggtttacccataaaacaacaggatctcgccaggcgtggtggctcacgcctgtaatcccagccctttgggaggccgaggtgggcgtatcacaaggtcaggagattgagaccatcctggctaacatggtgaaaccccgtctctactaaaaatacaaaaaaattagccagccatggcagcatgcacctgtagtcccagctgctggggaggctgaggcaggaaaatggcgtgaacccaggaggcggagcttgcagtgaaccaagatcgcaccactgcactccagcctgggccacagagcaagactccatctcaaaaaaaaaaaaaaaaaaccaaacaggatctcctcaggccgggcgtggtggctcacacctgtaatcccatcactttgggaggccaaggcgggtggatcacctgaggtcaggagttcgagaccagcctgatcaacatggtgaaaccccatctctaccaaaaaataaaaaaattagccgggcatgctggtgggcacctgtaatcccagctactcaggaggctgaggcaggagaattgcttgaacccgggaggcagaggttgcagtgagccgagatcacatcattgcattccaacctgggcaacagagcaagacttcatcttcaaaaaaaaaaaaaaacaggatctcctcaaagggatatcttgagcaagcataggccactatatgagggccgagtgtctggcacatagtaaatgttcagtaaaaaactattgtagactgggtgcgctggctcatgcctgtacccccagcactttgggaggccaaggtgggtggatcatttgagatcaggagttcaagaccagcctggccaacatggtaaaaccccgtctttactaaaaatacaaaaaaattagccaggcatggtggtgcacgcctgtactgccagttactcgggaagctgaagcaggagaatagcttgaacctgggagactgaggttgcagtgagttgagatcgtgcccctgtactctagcctgggcaacagagtgagactccatctcaaaaacaaacaaaaaacaacaacaacaaacaaaacaaaaaaacacccaaaactattgtaattattatcgttcaccataacatagcaataaggttggcagattctgagccagactgtccgggttcagatctcagctctaaagcttatagatgatgtgacctcagacgagcccattaacttctctctgcctcagtttcctcaccttttaatggggatggaaattttatctgcttcatagagtcactgtgagagttaaatgagtttatatacatcaaatgcttagaaacaggcctggcatgcaataagtccttacttcttattatcatttgttcattcattcgtcaaatatctatttttttttgtttgtttgttttttgtttttgagacggagtcttgctctgtcgcccaggctggagtgcagtggcacgatctcagctcactgcaacctccgcctcctaaattcaagtgattcttctgcctcagcctcccgagtagctgggactacaggcgcatgccaccacaccctgctaatttatgtatttttagtagagatgtggtttccaccatattggccaggctggtctggaactcctgacctcaggtgatccacctgccttggcctcccaaagtactgggattacaggcataagccactgtgcccggcctgatttcttctttttttttttttttttttgagatggagtttcgctcttgttgcccaggctggagtgcagtggtacaatctccgctcactgcagcctccgcctcccaggttcacgtgattcccctgcttcagccttccaaatagctgggattacaggtgcatgccaccacacccagctaattttgtatttttaatagagacggggtgtcaccatgttggtcaggctggtctcgaactcccaacctcaggtgatctgcctgccttggcctcccaaagtgctgggattataggcgtgagccaccgtgcccgggctgtctattgatttcttatcagatgccaggatttggggtggtgtggaactgagttaaattgaacctccttcttgcccctcagaatttcccagtccagtcctgccccatttcagtctctggcttctgaaggtcacactggcttccctccagtttgggacctgcctggggtctgcgtgtgtacatggcaggcgaggtggggctatagggtggggtggaggacaggagcagtgtctctactgacccaatacttccccttcaggttctttgcggttcctgtcatggccctgattgccaatttcggcatccccaagtgggcccgggagaagattgtcaatggcatccagctggggatccacttgtacgcccatggcgtgtttctggtgaggatgggcatctgtggggggtggaggggaggacccgagggcagaagatgtgtgaggctcctacacctgatctgctggacctcctgttctgaggtcttgatccattttccttttagtcattctccctttattgagagcctgcttggttcctgcagtctcctctattgtgctcctcagagtccattttcttctctttttttttttcgagacagagtctcactctgtctcccaggctggagtgcaatggcttgatctcggctccctgcaaactccgcctcccgggttcaagtgattcttctgcctcagcctcccgagtagctgggattacaggtgcccaccaccacatgcagctaattttttgtatttttagtaaaggcagggtttcaccatgttggtcaggctagtctcaaactcctgacctcaggtgatccacccgtctcagcctcccaaagtgctgggattacaggcatgggccacctcgccgggcccatgcccattttcttctgttcccctctccaactttgtgtcctggcttctttcctcaacccccatcctctctctttgccctcccttcccatttccattcctgaccctgtgtccccagattcttccatttctcttttgtatccccactgccttccccaccctccttgatctctccactctccccctgcccctgcccaaattctgccatcacaggccactgttcaggaagaagcatctggggtggcacagggtgaagcttttgggctcctgggtcggcaacaggagggtacagcaccacatcttttttttttttttttgagacggagtctcactctgtcactaggctggagtgcagtggcgcgatcttggctcactgcaacctccacctcccaggttctcctgcctcagcctccggagtagctgggactacaggagcacgccaccatgcccggttaagtggtttttttttttttttttttttgagacggagtcttgctctgttgcccaggctggagtgcagaggtgcgatctcggctcactgcaacttctgcctcccaagttcatgccattcccctgcctcagcctccctagtagctgggactacaggcgcccaccaccacgcctagcaaattttttttgtatttttagtagagacggggtttcactatgttggccaggatggtctcgatctcctgacctcatgatccgcccgcctcggcctcccaaagtgctgggattacaggagtgagccactgcgcctggcccccaccacgtctattctttgccctggttcacatcctatctgacattcttggtgacagttctaatattcattaatttattcatcaattgttcactgggcacctgtcttgaaccagtctgtttcattctaggaacatccatatgcatttactcctgccctcttgtttaattgtcagagcagctccaggagagggtggataattgacattgttcccactacacagagcggggaagctaaggcccagagaggagaagtgacgtgccagggctccgtggcctttggcggcaggcaaatactttgaaccctatccttctccagcagaccacaaggtctgaaatgaaggggaaccagaaagggcaacaggcatgacccagtgtcccagcttctgactccagggatctacaacgtaccccgtgtagggagtgggcccagccaccgagggaggggacaggtccccatcctttgcctcagaggctgacataggtacagactcgctcaccttcccaggctggtctatcctgaagctctgcaggaagtcagaaagggacagaaagaggagaaatgctgagaacccatcatgtgctgggctctgcaccagtggttttcatttccaccctctcatctttccaagtaggcgctacagtcccttttccccacagcgaggctcagggagtttaatcaacatgccccagatcccatactcagtgagctacagatcccagaggcgggatgcaggctcagaacggcaagcacagcgcccttcctgctgtatctcagccagcttccttcctaaggatgctcacgttagctcagcacagctccacctgggtatctcaacgctcattgctttcagctccttgttcatttttttcagcacaaccttagaagagctgtgttaggtttccgggatatggcggtggagtcacacccagtccctgccttcacagcctatcagactaactggtaccagacatccctacattccaccaatatttatttatttatttatttattttaaattttttttttttgagatggaatcttcctctgtcgtccaggttggagtgcagtggcatgatctcggctcactgcaacctctgcctcctgggttcaagcaattctcctgccttagcctcccaagtagctgggattacaggcgcaccaccacacctggctaatttttgtatttttagtagagatggagtttcaccatgttggccatgctggtctcaaactcctgacctcaggtgatccgcccgcctcggcctccccaagtgctgggattacaggcgtgagccatggcgccttgcccaccaatatttactgaaggcttatatgcgccaggcatggttctagaaggtactagggactcagtagggaacagaagagtctggttcctgcctcatcgagacattttagagtctattagttgctgtccaattgaactttctgtatttatgaaaatatcctattacctgcactttccaatatgggagctactaaccacatgtggctgttgagcacttgaatgtgggtagtgcatagtgagtgtgtagtgaggagtgtgaccaaaatttaaattttattttgattaaatttaagctacatgcagccagtggctatcatacagtgcaggacgctgaccctaagcaatcagtgacagctcagtgatcaggcctctgatggaggaagcacaggccgagttttgttgaagggaaaaggtgagggtccagggcatttggagagcccagaggggacgcctaatccagtgtgaatggcttcagggaagtgtggtggatgtcaactgaaagggaatccttcggaccccaagtttatggggacagcctccggcctgacagtgcctctcacacctgctcctggccctggcctcagatcatgacccgcccatcagcggccaacaagaacttcccgtaccacgtgcgcacgtcgcagatcgcttcagccggagtccctggacccggagggagccaatccgctgacaaggccttcccgcagcacgtctatgggaacgtgacgtttatcagcgactcggtgcccaacttcacggagctcttctccatccccccgcccgccacctccgtaagccccgcggccccagcgcccgaggagctgctggcgccgcccctggagtacctgaccccgctcccggccccgccgccgcccccagcgcccggacccctgagccctcctcctgcctttcgcactccccgcgccccaacaccgcgccgcgaccgtcccctggcgcccgcgcccaccctgcctgactgggttctggcgctgttgcgcacacccccgcagactccctgcgccgtgcccccaccgcccgccttccgcggctctcccccagctccccggccgccgccggagttcgccccgcgcgccccgacgccgccctttgagtacctggccccgctgcccaggcgccccgccacccagtccttccctgactgacaacgtgcgtccacacctggggtggaagggttctccgggggagggggacgggccttcggggccgcatctgccccccgagggtcccggacggcctctgaccctgacccccctcccaggccgggaagcaggtggaggagacagcggtggcggcggcggtggccccgaggggccgcgtggtgaccatggccgagccgggcgcagcctcccccccacttcccgctcggttccccaaggcggccgactcgggctgggacggcccgacgccgccctaccagccgctcgtgccccagacggcagcgccgcacaccggcttcaccgaatacttcagcatgcacacggccgggggcactgcacccccggtctgagcacccctgcccgcccctgccccatgggccatgaccgggccccggccgggctccggacccctgctttatcccggcccgagagctcgcccatccccggccttcccgacccttcccaccccgcgcgcccaggttgggtacgctgcgtcccgcccccctcccctctgtgccaaacggtcccgcgggagccgctctccccgtcccctccctcagcccctgccccgagcggcgccggattctgggctcccgctgttccgtgacctccggccccctggcccccttcgagacctctgaccccgctggactccggaacacccgtggtgaccgccgggaccctgcctgtgactctccaggactctgcgaccccgggatggatattgcgatgctggtctcgaccctgaaaccctccctcggatctgtgacctcggacccgtactccatctgccgcatctccattccgggggccttccctcgggtccctggcagaaagacattttaccccttcttgccaaaataaaaaaggattcgtttttatctataacatggcttcttttgcatcttgatggtgttcagcggcggggctgagccagaactatgtcaggctcgggacctcagtgtgtccatctgtgaaatgggaatttggaaccggaggcaggggcctgtataacctgatctttatgttgccccagaatgtgggaacattgaagatgatcaaacatctagcagggtcttgcaccgctcctttatttttgccttcctttcctcactcagaggtagaggcgccctccagtggcccatgctttgctgaaccacaggcacccagagtttgggttacgatcttagcactgcgcatatgtgtatttctctccctccaggaggacgctgctgcgcatgcggttgggaacaaatgggcggggatttccccggaagtctccctttatggagggttggggttgggcgctccgcagtcctcccagggccgctctgaccggccgctctgtaacttctcgcctcctcttcgccgtccctcccacagcggctgctcggctcccgccccctcgccctcccacagcgggtcttcccgcggccgctctggcccaagcgtcccctcgtctctctgatctggcccatccggcttcggagggaggcgagggtgggtgagcaaagggattgggtctgtggggtccaggcccgaacccctgaagacgggctccgcccccggcacccgctcgcgccccgcccccggctggaggagtctctcctggaccatccgaacctagcctgtcccggcccgcagcctctatggaggctcctgccgggccgtagagcccttcgccccctggggacccacccgtctataaggtccgtttggcctgcagcagcctgagtccgtaatgctgggcactgttcatgggatcggccccctatggagccctgtgtctataggggactcctacggtccctagggttcggccccgtccataatgactccatatacagggccttccatcgctctatagggctcagccctcggcttccagagcctgtcagcagtggccgtacccttcgccgggactgccgggtctccgggacctcttcgatctacaaggtcatgttatgcctatagaggtcgcatttgcagggcctcaccccgggtagagggtcctctccaggtttttacggcctgtccccgctctaagggtcagtgcaggaggcggcgatggccctgggcaaggttctggccatggcactggttttggccttggccgtgctggggtcgctgtcccctggggcccgggcgggggactgcaaggggcagcggcaggtgctgcgggaggcgccaggcttcgtgacggatggtgcgggcaactacagcgtcaatggcaactgcgagtggctcatcgagggtgagtggggccgcgtgggtcactcactaattcgctggtagttcattcatgtgtgcattcatccactcaccacattcccagagctcggttctggtccaggccttttgctctaaaatgcctgacacccagggttgcagccaacctgggccctgccctggaaggcctccaagtctggtgggggagatgcacctacacccagatttacaattacaagacaggagcatcagtgccgggccttctgagtaactgttaagaactcagggtctgggtccaatcatttggctttgaatttggttctactactactacttttttttttttttttttttgagatgggggcctcactctgtcacccaggctggagtgcaatggtaccaacacaatttacttactgcagcctcgacctcctgggctcaagtgatcctcccacctcagcctcccaagtaactgagtgtgtagagacagagtctcaccatgtcgcccaggctagtcctgaactcttgggctcaaacgatcctcgcacctcagcctcccaaagtgttgggattgtaggtgtgagccactgtgcctggcttcttattattagctttgtgactttgagcaggtggttttctttctctgaggttctgtttccttcccccacaaatgggataacaacagtactcacctcatagagttgttggaatgaaatgaaaacaggtatttaacatgcctgatgtgtggcatatagtaactgttcaataaatggcattaggattattgttgttgttatttgtgaagtacttcaataaaagcatttttcttcagtcattcatgtgccagacattatgtttcccattggacatagcccagactgagacagctccagcaatccctggtgacttaggtcttggagtctagttggggagacaaacacattaatagtgagagacaagagtggtctttgatggaggaaccccagaggcctgggagagcccagagaaagtgcctgatctggggccggggagaacagagaggcttcctggaggaggaaatgtctaagctgagacttaaaggaccaataggaatctgtcaggagtgggaggaaaggccccagccctacccttctgggctcccagtcagtgggagagacaaacccactccgaggctgtttgttttccttttccacccaataaactcctatgcatgcctcagaaccctgccccagtggctctttctctgtgaagacatgtggcttaacctggggtatagctgagatcagaggcatctgtacgagggagcagaagggcattccaggcaagaatagctgtgcaaaggcggggaagcgggagagtgatgcttttgaagaactagaaatccagtgtgttaaaacatagaatactggcagggtatggtggctcatgcctgtaatcccagcactttgggaggccgaggccggcagatcgcctgaagtcaggagtttgagaccagcctgggcagtatggtgaaaccccatctctactaaaaatacaaaaattagctgggtgtgatggcgcgcgcctgtagtcccagcttctcaggaggctgaggcacaagaatcacttgaacctggaggttgcagtgagccaatattgtgccactacgctccagtctgggcggcagagcgagactccatctgaaacaaaaacaaaaacatagaatacaagacaacgaatgagccagaggctgcagggtgggaggagccagcaggtgtagggctctgtgattttgagctgtatcctgagggcaatacaggggtgaaagagaagttgaaaggcagtacctgcagaagcccaggaaggcctcacagagtagtggatgtaaaagctggcctccagacaggggaggtcctgggcaaaggccagaggtgtgacagagcctggatcatgcagggcctcccttgggaggctgtggagctttgtctttgtctgggggctctggggagctatggaagggttttgagcagggagaggacatgatctgatttatgttttagaagatctctctggctgctgtgtggggtatggatgaaggcctgtttctcagtgatagcatgtctacctgttcccagcttgggggccattcctgtcaagctagtgggatgagaacagaataggaagtgtgtgtgtgtgtgtgtgtgtggcgaaggggtctgtgtgctggatataaatcactctctggccttaaagagtcccagactggttaggccaggtgcggtggctcacgcctgtaatcccagcactttgggagaccaagtggggcggatcacctgacgtcaggctttagagaccagcctggccgacatgaagaaaccccctctctactaaaactacaaaaattagccctgcgtggtggcgcacatctgtggttccagcctgggtgacagagcgagactctacctcaaaaaaaaagaaaaaacgtctcagactggttgggaatggtggggctggacacagatattcagcccccagtgtgttcactgagacagtgctcagggctaagaaggaaagtggaggggtggggtggatgtacctagggaggaaagaggactgtgctgcagataacagagcaggagccactaaaatagggttctgaagcatgcataggagtttattgagtgggaaaagggagcaaacagcctctatgaagacgtgagggtggctggagtgtctcaggatccccatctaggtttgcctggtcttatggcacttttgactgggaggtaatgagagccagaagcaggggaagaggggccttgaatgtcacactgagcagcctggccttccccttggggttgatgggcagccacaggaggttttgagcaggagtagggcattgccctcaggttgggtgtggggcagactggagacttgatgagctgatctggcaagagaggatgagttcctaactagggcaggggcttagaggggtggagaggtgtagacagtgcaatcgatgtttgtggagtttcacctataagacttggggaccaactgggtagatgttggggtgagggaggaggctgggagacctccagatcccccttgatgatcttctgttcttaccaatgcctgtcacttcttacctataagaaccaacatcttcctctatctattataaaataaacaaccagccaggggcagtggcacatgcctgtaatcccagcactttgggaatctgagatgcaaggattactcgagcccaggagttagagactagcctgaacaacatggtaagacactgtctctacaaaaaaattacaaaagattagctgggcttggtgggtggtggcatgtgcctatagctccagctaccggcgaggctgaggtgggcagatcccttgagcctaggaggctgaggtctcagtgagccgagattgcgctgctatactccagcctgggcagcagagcgagaccctgtctcagggaaaaaaaaaaaaaaaagataaacaaccaacctactaacttttgtattatgttcatactttatctagtcctagactttttttttccgagagagaatcttgctctgttgcccaggctggagtgcagtggcttgatctcggctcactgcagcttctgcttcccaggttcaagtgattcttgttccttggtttcctgagtagctgggattacaggcatgtgccaccatgccgggctaatttttgtatttttagtagagatggtgtttctctatgttggccaggctggtctcaaactcctggcctcaaatgatctgccctgggattacagacgtgagccaccacgcccagcccagtcctagtccttataacatcctcatggataagaggcatcctgcttttgagcaggagggagtttgggatcagatttctgtctggagtggtatgggggttgggtggaaacagaagaccttcaacttagggaagaacttggggaggcagatggtgagctggcctccagcaggcacttaacaaagatgtacttgtgattccagaaacagagctttatagtttggttgaggctggtaagattctgggaggtctggttgtgtggccgtgctgaatggttcttctgcattccccaaagcatgggtggggtctgtgtctgatgtcttgggggctctggttagagcctgagggagagcttccagctttagtattctgtcttttatgtatttcttcatttcatcatccagcatttcctgagcctttgccaagcccgggtctgggcaatgctgcagagggaattaggtccacatccaggccctgctctatgggccttgtaggctgcagggagacagacctggacatagatgttcctggcccagaggaatgaaggttataatgggatgtgagaaccctggagagggggcatctaacccagctagggggcatcaggaagaggcctggtggtgggaagggataatatgttgcagacagagggagaagcttgtacaaaggcccagctcccattagagctgtaagcagtggggtgatttgagacaaagcgagggtctgaacagcaggttagggacctggactttctcctagggtggtagggagccatgcagggctttggggcaggggagggacggggccagatgttgagttgggaagatcagagactcatgtcaggggaagaaggaggttggatcagtggttctggtgagacaggatgaggccgggcagccagggcacactctggctctaagctggcaggctggagtcatcacctcgttgaatgttcaccccagcctttgtgggtggggggaattatccccattttacagtcatggaaactaaggctcagagagcccatggaactggcccaggatcacccagccattggcagtggtggctgagtgtctccaggatccagataggcacactgagggtcatgggggaaagggctggcccagggtcctccagctggtcatgggcagagccagagccagagccagagcctaggcctcctaatttccctcacccagaggactcccctgagctgcctgttcagaaggcttctcatgtgggatgtggaatgagagaggctacctgaactaggactggcagagaataagacagtgacagtgttaggggtagtggcactctccacgatatgtgggccccattgtcaacatttcttttttttttttttgaaacagagtttcactcttgtcgcccaggctggagtgcaatggcatgatctcagctcactgtaacctctgcctcccgggttcaagaattctcctgcctcagcctcccaaatagctgggattacaagcatgtgccaccatatccagctaattttttgtatttttagtagagacggggtttcaccatgttggccaggctggtctcgaactcttgacctcaagcgatccacccaccttggcctcccaaagtgctgggattataggcgtgacccacggcacccagcctcttttttttttttgagtcccctctgtcgcccaggctggagtgcagtggtgcaatcttggctcactgcaacctctgcctcccgggttcaagcaattctcctgcctcagcctcctgagtagctgggacttgcaccaccatgcctggctaatttttgtatttttttttagtaagagacagggtttcaccatgttggccaggctgttctggaactcctgacctcaggtgatccacctgccctggcctctcaaaagtgctgggattacaggcgtgagccacccaccccactctgttgtcaccatttcgtgtgcattattgctcctcatgaggttgcagtcagatgtcagctggggctgcagtcagctgaatgttcaccttggctggacatccaggaaggtccctcccagggctggcagttgatgctggctgtcagctggaagctcagttgggactgtcagccggaatgcctgtgtgtggccttttcttgtggctttggcttttctttgtttttttttttgagacgaagtctcgctcttgtcccccaggctagagtgcaatggcacaatctcggctcactgcaacctctgcctcccaggttcaagcaattctcctgcctcagcctcccaagtagctgggattacaggcacccgccaccatgcccagctaatttttgtatttttagtagagacggggtttcgccatgttggctaggctggtctcaaactcctgtcctcgtgatccgcctgccttggcctctcaaagtgctgggattacaggtgtgagccaccgtgcccagccggctttggcttttcctatcatgacagctgtgttctgagaaggagcattctacgaggcccaggtgaaaagtacaagtcttcttatgatctagccttggaagtttcagaatttctgctgtttttttattggtcaagcaagtcactaaggctcttcccagatacgagaggcagggaattaactttcaatggcaggagtggcctataagtttgattccaccacagtaccactatatcccactttagagatgaggagaccgatccagagggggtgggttacttggccaagatcacacagctggtagctatttggtggcagagccaagacataagctcaggcagtctggttccagagtttgtgcttgtaaccatcacaataagcagaggtgagactctggatggggacagaggggaactatgccgctccaaggttaggcctctgttctgggggaagaagctggactcttctcttgcagctctattcagcgtgggccaggggtggtgtcacggaggtgctcttctcactgggattatgaccttgaccctccagcctggacatgtctgaaactcaggcatggacaggaagagagaggcatcaggaacactggattctgctctgtgtggccactgggatggggttttctctgtacttaattttcccatctgaatggtgggagtgttcattctgatctcaggtgacctttctagaggtctggaatattatgattctttctctgggctcctgtccctctggctgtcacagcccttgactgccctaggttatgagactgggggccccttcaaggcggggcccaggtctgactcattcttgagcccccagcatcacctggatcagggtttggtgtacaattgtgggaggctgcagggaggtgtggggagaaggtccgctttagagcttggtccctctgtgctcacctcccagccccaagcccccagcaccggatcctgctggacttccttttcctggacacagagtgcacgtatgactacctgttcgtgtatgacggtgactccccgcgagggccgctgcttgccagtctaagtgggagcacccgacctccgcccatcgaagcttcctcaggcaaggttagtggggatggggccgtggcagatacaccgagggaaatggaagaagaaaggagggacagagagtcagtaagagggcatccaagagcagagcacagggacaagggaaggtggagagaggcaaaggaaggagatgaggctctgggtcccccagggtggaagggggcaggagtgggccaccctcccaggacaatccccaggccctgcccaccttacccagcacaccttgtgcccgcagatgctgctgcacctcttcagtgatgccaactacaacctgctgggctttaacgcctcattccgcttctccctgtgcccgggtggctgccagagccacgggcagtgccagccaccgggtgtgtgtgcctgcgagccgggctgggggggtcctgactgtggcctgcaggagtgctcagcctactgtggcagccacggcacctgcgcctcggtgagccggtccccagccctgtttcccctggggccctgatctgtgagcgcagcctccacgcccatctcctaggtctgaccttgctcctgcatgaaactccccccaccaccccaccctcctccgtgacacccacttccctctccttccagagcttgcccctcacctgttactccaaccccaccccaccttcacctgcagggcctcccctgctgaggatatcccactctcatctataccccactctcatctgtgaacaccaccctccttcctccagccaggcccaaatctgtcctcccatccagccactctgtgtggccttggacccctgccatgacttccagcctcgcaccactgaccttacgccgaagctgtgtacatccagctttcaatctggattgcgctttgagccctccccgccttgacctccccagatctgagctctttcagtccaggctgaatgtcaactacgctgtctgtattctcccagcctgccgtctttctgtcttttctcctttttctctgtgcatcttttcctttttctgttggtcttcttttttccgtctgtctgcttccttctgattgtttctctttgtctcttgtttctgtctgacagtttgcctttcccctcttcctgtctctctctgtctccctttctctctctctctttccttttccatcctctcccttcctgtctgtctctttctctctccctttgtgccctgtctgtctcattctgcctcttttcctctctgtgtctcctttgtctctctgtccttgtctctccctctcttatctctgcctttatgtctcctttcccgcagcccctgggaccatgccgctgtgagcctggcttcttgggacgtgcctgtgacctgcacctgtgggagaaccagggggctgggtggtggcacaacgtgagtgccagggaccctgccttctctgcccgtattggggcagctggcgccttcctgtccccaccagggctgctggcagttttcggaggtgagcagatggggcgagtatctgggatctggaggcccggcagcctatggccagggcatgagactatccacccctccacaggccaggacctcaacaatgccctgggtgacctcgtcctatacaacttctccgccaacacctgggagtcttgggacctgagtcctgccccggtatggacccctcctctgccctggaggagcctttccactcaatcagacccagccggggacccccggaatgatcccctatcacctagtgctcccacagttcctgcagcttgatataggaacctacttctccctgtttctgccttttctctccggttttcttttttcttcttcctcttcctttatctgcctttgtgcatcttatttttccatgtgtctcctgttgctcaatctgtctctgttttcgtctgtctgacttttgggcttctgtgttctctgtttctgtgtctccatctctctggatctgtttctctctgccatttgtccctttaactctgtctccttgccttttctctctcttattgtatttctctgtttctatgagtctgtctcttcttttctctctctgccggtctctgcctttctctttgtctctgtctttatctcgccttctctccatgtttctctggctctgcatctctctgtctaagcctggctctggctctcttgctgtgtctctacctctgtctcttttctcttcctcacaggctgcccgtcactcccatgtggccgtggcctgggccggctccctggtactgatgggtggtgagctggctgacggctcgctcaccaacgacgtgtgggccttcagtccactgggcaggggccactgggagctcctggcaccacctgcctccagctcctcggggcccccaggcctggcaggtcacgcggctgccctggtggatgatgtctggctatatgtgtctggaggccgcaccccgcacgacctcttctcctctggcctcttccgtttccgccttgacagcaccagcgggggctattgggagcaggtgattccggcaggcggacggccccctgctgccactggccactccatggtgttccatgccccctcccgtgccctgctggtccatggtggacaccggccctccactgcccggtaagtgacctgtcccataacccatgctccacaggccaggcccagctcaacaccataggcctttagtctttagaggtctttgcccactgtcggactcctgtggtctctcagtcactccttccttcatgtatttacttattccttcgttcactcattcattcattcacccactcacacattctctgatgttttattcaatctcttggtgaattgccttccacacactcccacccatgtatctattcaacagagccctgcttggtgtccagcccttgctagcttatgcaggtaactcagagatgactcagggtcctgcccacagggaacttctagtttggaggggacatagagtcagtcatggccagtctcatccctgggtgatcacatggctcctaagagcctggaggagggagagagacgcttcctgccctgagcccctgccctgcttctccttcggtaggttctctgtgcgagtgaactccactgagcttttccacgtggatcggcatgtgtggacgacgctgaaggggcgggatgggcttcagggcccaagggagcgagccttccacacagccagtgttctgggcaattacatggtggtctatggtgaggaggctccccaatcctgcctgcctgcctgctgagggcctgagccaaccctgagctgaggctccctgcaggggagtccccccacctcccctaggcttgccagctatgcccctttcctccattcccagggggcaatgtgcacacccattaccaggaggaaaagtgctacgaagatggcatcttcttctaccaccttggctgccatcaatgggtgtcaggagctgagcttgccccgccaggaacccctgagggtgagtggtccctgttcttccctaggggctcctgagggtcccacctctctccatagtgattctgggctcaagccacctcagtccgtaagggtgagcctgacatccaggccagttggtgccagccttaggaggcaagcctgggatggagatgggactagggcatcgtcaccatggagatgggaggcccttaccgcagtatccaatgtgggttccaatccaggttttgccagtttccagctgccccagggaaatgcctaagaggcagcaacttttccttctttttaactttcttttcttttctttttttttttttttttttgagacggagtctcgctgttgcccaggctggagtgcagtgatgtgatctcagctcactgcaggctccaccccccgggtttcacgccattctcctgcctcagcctcctgcatcgctgggactacaggcgcctgccacctcacctggctaattttttgtatttttagtagagacggggtttcaccgtgttagccagggtggtctcgatttcctgacctcatgatctgcccgcctcggcctcccaaagtgctgggattacaggcgtgagccaccatgcccggcctcttttctttttttttgagagggagtctcgctccgtcgcccgggctagagtgcagtagcgtgatctcagctcactgcgacctccacctcccgggttcaagcgattctcctgtctcagtctcctgagtagctgggattataggcatgcatctccatgcctggctaatttttttgtgtttttagtagagacagtgtttcatcatgttggccaggccagtctcaaactcctgacctcaagtgatcctcccacgtcagcctcccaaagtactgggatcacatgtgtgagccaccatgcttggcctttttaactttcaatttaggttcagtggtacaagtacaggtttattatataggtaaattgtgtgtcatggggatttggtgtactgattatttcatcacccaggtattaagcctagtacccaacaggtaggttttttttttgttttttttttggggatggagtcttactgtgttgcccaggctggaatgcagtggtgcaatcttggctcactgcaacttccacctcctgggttcaagtgatcctcccgcctcagcctcctaagtagctgggagtataggcgcatgccaccacacccggctaatctttttgtatttttagtagagacgaggttttgccatgttggcaaggctggtctggaactcctgacctcaggtgatccgcccacctcggcctcccaaagtgctgcgattacaggcgtgagccactgtgcccagccccagtaggtagttttttgatcctctccctcctccaaccctcaggtaggcccctcaagtgtctgttgttcccttctttgtgtccctgtacactcgatgttttgttcccacttgtgagaacatgcagtatttggttttctgttcctgtattagtctgctgaggataagggcctctagctccatccatgctgatgcaaagaacatgatctcattcttttttatagccacatagtattctatgatgtatacgtaccacattttctttttttttttttctttctatgtatttttttttttttttttttttttttttgagacggagtttcgctctgtcgcccaggctggagtgcagtggcgggatctcggctcactgcaacctccacctcccaggttcaagcgattctcctgcctcagcctcccgagtagatggattacaggcgcctaccaccacagccggctaatttttgtatttttagtagagacggggtttcaccatgttggctaggctggtctcaaactcctgacctcaggtgatccacctgcctcggcctcccaaattgctgggattacaggcgtgagccaatgcgcctggcctccattttctttatccagtctatcattgatgggcatttaggttgattccatgtctttgctattgtgaacagtgctgctttgaacatacacgttagaacaatttatattccttggggtatatacccgataatgggattgctgggtcaaatggtaattctgttttaagttatttgagaaatcttcaaactgctttccacaatgcctgaactaatttacattcccatctgcaacctcactcgcatgtgttattttttgactttttgataatagccattctgactggtgtgagatggtatctcattgtggttttgatttgcatttctctcatgattagtgatattgagcattttttcatatgcttattggccacgtgtatgtcttcttttgaaaaatgtctgttcatgtcctttgtctactttttaatggggttgttttttgcttgttagtttatttaagttccttataggttctggatgttagatctttgttggatgcatagtttgcaaatattttctcacattctgtacattgtttactctgttgatagtatctttagcagtaactttttcaagatcacagtagataagtgacagagccagcatggctatccccaaacaacaatctgtataaaactatcacttaaggccgggtgcagtggctcacacctgtaatcccagcactttaggacgccatggcgggcagatcatgaggtcaggggtttgagaccatcctggttaacatggtaaaaccccatctctactaaaaatacaaaaaattagctagtcatggtggcatgcgcctgtagtcccagctactcaggagactgaggcaggagaattgcttgaacctgggaggcagagcttgcagtgagctgagttcgcaccactgcactcccacctgggcaacagagtgagattccgtccccaaaaaaacaaaaacaaaaactattacttaatctctgtgcctcagtttgctcatctgtgaaatgaaaattataacacgtaatgccattggatagctgtaagagtaaattgagatgatccttcaagaatgatgcccagtgaagtgctccacacatttcctttcttttttaaaatttttattatttatttttgagacagagtcttgctctgttgcccagactgaagtgcagtggtgtgatcttggctcactccaatctctgcctccgaggttcaagcaattctcatgcttcagccttctgagtagctgggactagaagcgtgtgccaccacacccggctaatttttgtatttttagtagagatggggtttgccatgttgaccaggtgggtctcgaactcctggcctcaagtgatccatctgcctcggcctcccaaagtgctgggattacaggcgtgagccaccgtgcctggcctaatttttgtatttttttagtagagatggggtttcactgtgttgaccttgtgatctgcccgcctgggcctcccaaagtgctaggattataagcatgagccaccgtgcccggccaggcattattattattgttgttactattttgttttattttacttgagatggagtcttgctctgtcacccaggctggagtgcggtagcatagtctccactcactgcaacctccacctcccgtgttcaagctattctcctgcctcagcctcctgagtagctgggattatagatgtgcaccaccactcctggctaatttttgtatttttggtagagttgaagttttgccatgtttgccaggctggtcttgaagtcctgaccttaagtaatctgcctgcctgggcctcccaaagttctgggattacaggcatgagccaccacgcccggcctattgttactattttagaggcagagtcttgttctgttgcccaacctggagtgcagtggtgcagtcatagcccactgcagccttgacctcccgggctcaagcagtcctcccacctctgcctcccaagtggttgggaccacaggcccatgctacccttcccagctaattaaaaacagaatttttggccaggcactgtggctcattcctgtaatgccagcactttgggaggccaaggcgggaaaatcgtgaggtcaggagttcgagaccagcctggttaatatggtgaaaccctgtctctactaaaaatacaaaaattagctggcgtggtggtagatgcctgtggtcacagctactcaggaggctgaggcaggagaatcgcttgaacccaggaggcggaggttgcagtgagccaagatcgtgccactgcactccagcctgggtaacagagggatactccatctccaaaaaaaaaaaaaaaaaaaaacacacataaaaacagattttttaaaattttttgtagagatgaggcctccctatgttgcccagagtggtcttgagctcctaggctcaagtcatccttccatctcagcctcccaaatagctgtgaccataggcacacaataccacgcctggctaattaaataaaatatttttgttttttagagatagggtcttgctgtgttgtccaggctagtgttgaactcctggcctcaagcgagccttgtgagatccagcctcccaacgtgctgtgattatagacgtgaactaccacgcccagacatattgtctttcttatagcagttagggtcctgtctcagggccagaggggtcaccagggaggagatatggagaaacctttcactctcattaaatcagacactgctttgaaatcggatgaaagccacaggccctctcttcagaagatgcttatacctgcaagttgggcgtatcacttcggggacgtgtgggcttcccagagtcgcatctgttcactcctcctccctgaaaaggagagagaggagaggacaagcgtaaggaaggaaccttagcacttaagggatgggaaggaggaaaggccccagaggaaccctgtgtgaccatcaggaataaagtccaggcctggtgtctgaggccctcattctaggtctcgtctgcctatcccttggtccccttcactgggcaggagtcaggagtgtgatgtttctggaggcctcttcctgcttcgcagtttgtgattacctgggccaagtcccacacgtttacagtgcacgcaggtcagtaagagggtagggaagtcaccattcactgaccacttacctgtcagtcaggattcttggctgtaactgacagaaacccaacccagctggcttaagcaaaaaggagaatttctggctgggcacggtggctcatgcctgtaatcccagcactttgggaggccgaggcgagtggatcacgaggtcaggagatcgagactgtcctggctaacacagtaaaaccccgtttttactaaaacacaaaaaattagccgggcttggtggcgggcgcctgtagtctcagctacttgggaggctgaggcaggagaatggtgtgaacccgggagacagagcttgcagtgagctgagatcgtggcacggcactgcagcctgggtgacaaagcgagactctgtctcaaaaaaaaaaaaaaggaatttcctggctcacttgagtgaaaactgtaggggctgtcttcaggctgggctggatctaggtgctcacaaaatggcatcagccatttctcactcaatttttcagctgggttcacttcagtctcttgccttgtgtagatggtcacaggcagctcgtggattatcttctgccataaaatgcccagaaagaagggagtgtctttgccccaagaattgagaatcaggccctgtacccctccctgagccagtcactgagactgatgggcctgggctaaggcctcacttctgccagaaccagggacaactccacctaagtctcacagattgggaaagggaaaggttggttttccagaggaaaatcaggcgctatcaccagaagagaggctggtgctagacagacaaaaatgggagactgaggcagcctactgggggctcagcagattcttcagtcctcccagctccctgaggacgagatgatggttctttttatagaggaggaaaccaagactcagagaagttcagtctcctgtccagggtcacacagctagtcagtagttgatccacgatttgaacccaagtaagtggtagatgcaggatttgaacccaagtctttctgaccctaaagatcagaaagatgatttgggtaggggcgagggagctcagcttgttcagggccaggtgggctgggagagtgtccttgggcaggtgaggttgaagcagccaccggaatagaaggctgggctgtggcccaggagaatcaggagccatggaggtggtggaggggctgggggtctaataatgtcattggggtctctattcccctaggccgagcagcgcctcccagtggtcggtactcacatgtagctgcggtgcttggtggcagcgtcctgttggtggctggggggtacagcggccggccccgtggggacttgatggcgtacaaggtgcccccctttgtgttccaggcacctgcccctgacgtgagcactggggtgacagggaaagggtggctggggggaggaggtagcagggtttccacaggtgaggggaaaggcaggaggggatccctgggagaaggagtggggatccctaggaccatgagagaagggaaggaggtccctggggcagaggaaagaggagctagaggtccctgggcctgggggaggaatggatgggcatgctgagcactcagggtcctctgggatagctaaagcaagcggggacttgggaggccggcccaggtctgagaggcctcctcctccgtccccttgcctccccctctgtccccttgcctccctgcagtaccacttggactactgctccatgtacacagaccacagcgtctgctcccgggacccggaatgcagttggtgccaaggagcctgccaagctgcaccccctcctgggacccccttgggggctgtgagtgacagccctagaccctctgttccctagcatagagacctgccctcagtgtctccctctgcctaaccagatggacaagaactttccctcaactgggagacttgttttcatgccggagatcctccttcctgattcctgactgcggagccctgaacctttgcctatcccacccagcccgacccttttgagcccgtgaccccatccccgcatcccccgtcctctggatctcccacattccaagtcaactccccgttcttcagttttttcgccctttccatcgcaggaccctgtatccacagcccttccttcccagatctcttgagctccagttgacagtgagccctttcccctctcctcctcgcagtgtccagccgccagctgcctgggcctgggccgcctcctgggtgactgccaggcctgcctggccttcagcagccccacagcccctccacggggacctggcaccctgggctggtgcgtgcacaatgagagctgcctccctaggcctggtgagtgtccgcagcagtgggccggcaggagggggccagagcactccacactgacccaccggcccccaccccctgtcttctcagagcaggcccgctgccgaggggagcagatctcaggcactgtgggctggtgggggcctgcgcctgtcttcgtcacgtccctggaggcctgcgtcacccagagcttcctgcctggcctgcacttgctcacctttcagcagccgcccaatacctcccagcctgacaaggtgggtaggaggcgtggccctgggtggggtgttgatgatcctgatcctagggtttgttttttctcaaatgcatctttatcactcttatgtttactccaaaactctttacattcaagggtcttattttccttatggactttattttttattttttttgagagggagtcttgctctgtcacccaggctgaagtgcagtggcgcagtctcagctcactgcaacctctgcctcctgggttcaagtgattctcctgcctcagcctcctgagtagccgagattacagatgcccgccactgcgcccagctaatttttgtattttagtagaagacgaagtttcaccatgttggtcaggctggtcttgagctcttgactttaaatgatccgcctgccttggcctcccaaaactctgggattacaggcatgagccgctgtgcctggcctccttatagattttaaaaagaatttttacattgtggtaaaatacacataaaatttttcatcagtgacatttagcacatttacaatattgtgcaatcatcaccactatcttgttacagaacattttcatcaccccagaggacaaccctggactcactaagtagtcactctctattccactcttccccccggtccctggcagctactaatctgttttccatctctggatttgccagttctggacatttcatgtacatggaggcctgtactatgtggccttttgtgtctggcttctttcactcagcgtaatgttttcaaggctcattcattttataacttcatttggaaaggaactctattcctttttatggttgagtaatattccattgtatagatggaccacattttgtttatccattcatcagctgatggacgtttgggctgtttccatcttttgactattgtgaataatgctggtatgagcacttgtgtacacgtttttgtttgaacatctgttttcaattcttgtggctgtatacctaggagcagaattgctgggttatatgttaattccatattcatcttattgaggaatgtccaaactgttttccacagtacctctttattgattttttgttgttgttgttgagacagagtctctctctctgtcgcccaggctggagtgcagtggcacgatcttggctcactgcaacctgcagctcccgggttcaagtgattctcctgcctcagcctgctgagtagctggaactacaggcacttgccaccacactcggctaattttttgtatttttagtagagatggggtttcactgtgttagccagcatggtctcgatctcctgacctcatgatctgcctgcctcagcctcccaaagtgctgggattacaggcatgagccaccatgcccggcctctttattgattttaaaaatagctcatatattcacatggttcaaaaatcacagtgacatcaaaagtcattggggctgggcacggtggctcacgcctgtaattccggccgaggtgggcggatctcttgaggtcaggagtttgagaccagcctggccaacatggtgaaaccctgtctctactaaaactacaaaaattagccgggcgtgatgtcgggtgcctgtaatcccagcactttgggaggctaaggtgggaggatcacttgaggtcaggagtttgagatcagcctggccaacattacgaaatcccatctctactaaaaatacaaaaattagctgctcatggtgatgcgtgcctgtagtcccagctacctgggaggctgagggaggagtatctcttgagcctgggaggcagaggttacagtgacccaagatcacgccactgcattgcagcctgggcaacagagtgagactccattttaattaaaaataaataaataaataaaaggctgggcacggtggctcacgccggtaatcccagcactttgtgaggccaaggcaggcggattacaaggtcaggagagcgagaccgtcctggctaacacagtgaagccctgtctctaataaaaatacaaaaaaattagctgggtgtggtggtgagcacctgtagtcccagctactcaggagtctgaagcaggagaatggcgtgaacccgagaggtggagcttgcagtcagctgagatcatgtcactgcactccagcctgggtgacagagagagactctgtctcaaaaaaaaaaaaaaaaaaaaagaaaaagaaaaagaaaaaaaagtcactaaatggacagtctctctcatttaccccactccctaccccttaagtggtccaaaattatctagctccagcatggctgcaacttaaggccaccatacctccctggaagatccatttgggtttctttgatcttattccagaatttacctattcagatgcaagtaagcatgacatcatatcatttttctttctcactaaactaatatactatgaacattatacgactgcttcctttttttcttcctggcaagcttcccataacagaacttaagaaacactctcattctttttttttttttttttttgagatggagtctctctctatcgcccaggctggagtgcagtggcaagcgatttcagctcactgcaaccctgcctcccgggcttaagtgatcttcccaccttagcctcccaagtagctgggattacaaacatgcaccaccatgcctggctgttttttgtattttttttgtttgttttgagacggagttttgctcttgttgcacaggctggagtgcaatggcgcaatctcggctcagtgcaacctctgcctcccgggtttgaacgattctcctgcctcaggctcccaagtagctgggattacaagtgcacgctaccactcccggctaattttttgtatttagtagagatggggtttcaccatgttggtcaggctggtcttgaactcctgacctcaagtgatctgcccacctcggcctcccaaagtgcccgccgtgcccagccttcattcttctttttttttttaagttgtataatattccatttacatttgtagtttatttaaatagcctcccactggtgaacacttggactgttccactcttctgctattacaaaatcacacaccaggaaaataaatcttgcactttgtctgccactttgaatattagatctgggctttgaagtgcttagctggaaaggtgaggagttggataagaagacactgaagtgtccagtcctggagttttaatgtgagatggaaatggctagaggccaggggtaaaggtgggctctgggaccctgtcgtctattgtctgaatttaggtcttgcctcttttcccagagtgacctttgacaagccacctaacccctgtccctctgcctcagtctctcatttggtaaaatggggaagaaggttgggttgaccagtcttttctggctctgatgtggcctgtgagtccagaaagggactcacacatacacccatccctggtggcacaggtctcaattgtccgcagcacgaccatcaccctaacacccagcgcagagacagatgtgtccctggtctaccgtggcttcatctacccaatgctgcctggagggccaggtggaccaggggctgaggacgtggccgtgtggacgcgggcccagcgcctacacgtcctggcccggatggcccgtggccctgacacggagaacatggtgaggccgcctgggacattcagggggttgtttatggtaaatagggagttaggggtgtggtatagagcatctgtggtgatttgaaggttctggggaagggctggggagaaattagaggcaggagatggattttttgtgtgtgtgtaagacagagtctcactctgttgtccaggctggagtgcagtggcgcgatctcggctcactgctaccttcacctcccaggttcaagcaattcttctgcctcagcctcccacgtagctgggattacagatgtgcatcagcactcctggctaatttttttgcattttaagtaaagatgggttttcaccatgttggccaggctggtttggaactcctgacctcagatgatccgccaccttggcctcccaaagtgctgggattacaggcgtaagccactgcgcctggctgggaatggatctttcgtagaggagggagggtgctgaggttttcaattgtgagcagaatttgagggaaactttgaagcaggtgaggaaggtctgagtcagacttgaaaggcccctgaaggctgggcatggaggtgtacacctgtaatcccagccctttgggaggtaggggcaggtggattgcctgaacccagaagtttgggactagcctgggaaacatggcgagacatcatctctccaaaaaatacaaaaattagctggccatggtagcatgcacctgtagtcccagctatttgggaggctgaggtgggaggatcacttgaacctgggaagttgaggctgcagtgagccatgatcgcatcactgcacttcagcctgagtgatggaatgagaccctgtctcaagaaaaaaaaaaaaaaaaaagcccctgaggaggagggtccctgggggtctcacctctgaggttctcaggatctaaggagctctgaggccctcttcttaggagggggtggggtacagggtgggtttggaggtatcaggggtctgaggaaggaatgggaagggttctgaggcccctgcctatcactcacacctaccccaggaggaggtggggcgctgggtggctcatcaggagaaggagacgcggcggctgcagcgccctgggtctgctcgcctcttccctctgcctgggcgggaccacaagtatgcagtagagatccagggccagctcaatggctcggcaggccctgggcacagcgagctaactctgctgtgggatcggactggtgtgccaggaggcagcgtgagtacccaggacctacctccaaccctagccgcaggccccagcctcagatcacctgggctttctgaaccccaggccacaaactctgaaatccctagattctggcctcggactccttaactcttggcctctgaactctggacctcctcttgaaccctgtggcccctgacctctgcctatagaccctaacctgatcccatattttgacccccatcttctgactcctcacccttgaccctgctgaccctgacctctgccctccatactttgacctataataatctccagattcctccagaccttggacctctttactgatttcctaaatcctgacttcctatgtgcctgagttctcaacctgggctccaaacccttactttcagttagcgccagactctgacccctgccccagaccttgactgctgccttcctgtgaccccttccccaggagatctccttcttcttcctggagccctaccgctcgtcgtcctgcacctcctattcttcctgcctgggctgcttggcagaccagggctgtggctggtgcctgaccagtgccacctgccacctgcgccagggcggagcccattgcggggatgacggggctggtgggtccctgctggtgctggtgcctaccctctgcccactctgcgaggagcatcgggactgccacgcctgcacccaggtgcctgtggggccaccaggggaggtcacaaggtggagggagccacagcaggcaatgggcagtcaagggaacccctggtggggggtgtgggggaaacagcaagggcttttggccttgatctgcagagcctggtggggagggtgagatggagctgtagagagaggcacctggggagtcaggactctccctgttgtaggggccagagaatgcaactccatccttttccactagcggggagtttctcagcataggcactggagcccaggagtaggccttcaggcctgccacctccaagtgatgtcaggcagccctcgacaccctgcttcctcttgttccctgggagggtttgtttccttgtgagtggcaagggagccgttaagggtccaggctctaagtccctgctctgtctcaaacagagtgaggcttcctatttctctccccccaccccaccaccatccaggagctcaacagaagtcccagaattgcacttctgtggctctggttgggccttgtacaggctcctgggccaatgactggagttgtggggagggaatgtggccccttgcccacctctggatcctgaggattgaataagccccacccggaccacacagaaggggtgctattgcctaaaggagacagtgggtgctgggcgggccgacccatgggtgtctgtggtcgaagggaggggtccagagacgcaggcagctggggagggagatggccttacagggacagtctgcagggtggggcagggggtgggatgggcactgggagtccaaaggaaagggctgagtggggttctgactcctctgcccaactgacccccaggaccccttctgtgagtggcatcagagcaccagccgcaaaggggacgcggcatgcagccggcggggccggggtcggggtgccctgaagagtccagaggagtgtcccccgctctgcagccagtgagtcaggctgggtgcagggagtgggtgggtggatgtgcctggggatgtgtgctggctgtggagtgacctggccccctgctccccaccccaggcgactgacctgtgaggactgcctggccaactctagccagtgcgcctggtgccagtccacccacacctgcttcctgtttgctgcctacttggcccggtacccacacgggggctgtcgaggctgggacgacaggtatggtccctggggcagggctaacagaggaagattccccaccggcaaggggctggggctctgacccccacccctgccatcctgcagtgtacactcggagccacggtgccggagctgcgatggcttcctgacctgccatgagtgtctgcagagccacgagtgtggctggtgtggcaatgaggacaaccccacactgggacggtgagcccgggcaggtgggtgggcagggtgcccggctgtgtccttcctccatgaccggtcattctaatggcctctttgcttctctgccctcttgcccatcccatggccaccttcccttttccgtactgtttttctgttgtttattttaccctcccgctcttttttctccatttttcctccttttccggctctctgcgattcgttttctttctccttgtctgtttctgtctctccgctctccctttcactgcatctctgtctatgtctctcttctgtcttccaaaattgtttttgtctgcgacttctcctggtttctctgtctctctttccaaatttgtatttgcatccctctccttccaattggcctcctctctccctgtcattgtttctatgtatggctcctgtttctatgttgtcccccgcttcttcactctcccaccctgcaggtgcctacagggggacttctcagggcccctcggtgggggtaactgctccctgtgggtgggggagggcctggggcttcccgtggccctccctgcccgctgggcatacgcccgctgtcctgacgtggatgagtgtcgcctgggcctggcccggtgccacccgcgggcgacctgcctgaacacgcccctcagctacgagtgtcactgccagcggggctaccagggtgatggcatctcacactgcaaccgcacgtgagtgaggcgggggttgctatggagatgttgccccaggctggggcacatggaggtggagggaggaagccatcatggcgctgggtcccctcctgtggaaccagcatccccagttagccaggggtttttaccttgcacactaggtccttattagagtgacagggtccccagtgtaaccctggttaccatggaaatggggcacccataggctgtgggccatagtcttcagcgttgccatggaggcggaggaggacctagttgaaagaggttttcacagtggtgctatgtggttgctatagagacaggcttggtgatgcatggagttaccttggagacagggtcacccacatagcccaaaaccatggaaacagccagtggctttgatggtgtcatggtgggtggagatgatggggtgctttaggggctctgggcctgcctggcgctttccccacccccaacacggcccctcaggtgcttggaggactgtggccatggtgtgtgcagtggccccccggactttacctgcgtgtgtgacctaggctggacatcagacctgccccctcccacacccgccccgggtccgccagccccccgctgctcccgggactgtggctgcagcttccacagccactgccgcaagcggggccctggcttctgcgacgagtgccagggtaagcagcccttgtcctgggcccagcctggacccagggagcctcctcccttcttggggctccagtttgctcttcttggagggggcctcagtgtcctctcatgcagctctaggtcccctgccccattcctgttcctgactcaaacaggtttcagtgccacccgtcactctggttgggcttcagttccccctcttgggacttgctgtttcccctgatctgggccttggtttctcacctttgaagcggctgggtggggtcagggtttagctgagccagtaggcctgggcctgtttccacccttgacttgactctgtcccacctgctggggcctccacagactggacatggggggagcactgcgaacgatgccggcccggcagcttcggcaacgccacaggctctaggggctgccggccctgccagtgcaacgggcacggggacccacgccgtggccactgcgacaacctcagtgggctctgcttctgccaggaccacaccgagggtgcccactgccagctctgctccccaggctattatggggatccccggtgagccaacgggccagccagggctgggtagggtgtgcttggggacacagtggggagggtcaggactggtctgacactggctcttctccatctccccagggccggtggttcctgctttcgggagtgtgggggtcgcgccctcctcaccaacgtgtcctcagtggcactgggctcacgccgggtcggggggctgctgcctccaggtggcggggctgcaagagccgggcctggcctgtcctactgtgtgtgggttgtctcggccactgaggagctacagccctgtgctcccgggaccctctgtcccccactcaccctcaccttctcccccgacagcagcaccccctgcacggtgagcactgaggaaacgagggttcaggcgcatgagccagaaccgtgtcccctgacccagcctgcatcctcagaccctgaccctagtattgctgtttttttttttttgtttttttaatccttcaaaacccaaactcctcctcagatccccagcactttgttcctaggcccacagacagacccccccatttcccagatagcttcctatttcctcagctcccatctccaattctccagattctcaatctccccattcctagagcaggaatggtaaattgttacaccttgtacaccaactctgattgattggtactgactgccaggagctgcatgttgagaaaggggctcaatgcaagagtgcctgatagatgagccgtgtctactttggacacaggaaggggagtggtggccttatgccatagtttgacagtctcccctggatgttcaaacagcccatttcccagtctcagattgccctcccctcttgaacccctcctcctcccagaccccaggtgtcgttctcatcctcattgtctcctaatcctcgattctgcacccctctagctgagctacgtcctggcgtttgatggattcccacgcttcctggacactggtgttgtccagtcggaccgcagcctcatagctgccttctgcggccagcgacgggacaggcccctcactgttcaggccctgtctggtacgggggctaggggaagtgggacctcttagtcctgggctatgtatcccttgcccctgaactcaccacctgaagtgggctcaggacccagctctgccgctgcttatggggtgatgtagtccctcaccatctctggacctcagtgtccttagttgagaggaaaataggattgcgccggctgagctacgtctgcagagagaagggctgaatgagacatgtctctggggcatatagaatgtggttggtgtgaggatcccacaccactcactctttccagctaggcaggagtgtagtagcgcaatctcagctcactgcaacttctgcctcctgggctccagcgattctcctgcctcagcctcccgagtagctgggattacaggcgcatgccaccatgcctggctaatttttgtatttttagtagagacagggtttcaccatgttggccagtctggtcttgaactcctgacctcaagtgattcgcccaccttggcctcccaaaatgctgggattacagacataagctgctgcgcccggcatatatatatatataactttattgaggcatattttatatatactaacatatcaagtaattcctgtcacacctacccccaaatcagtatcttttctaaagagatccagtctcatgtaagggcagtaggagttgtggaaggtttggagcttgctgattacagggcccaattcacgttttgaggatcgctgggccaccatgagtggggagtgtaggcagccaggatgaccagtaggggatgggtgccggtgtccaggtgggacaggacttgggcttggatagcagctcaggaggtagctagcagtcggtgagagatttaggcttgaagatcaatcttgatgggttggctgagggagggggtgcagaatggttcatcctggcgatgattatgaataatatggtgccttccttccctgcccagtcacactgggttttcttagcatctgggggtggaaggggccaggaacgtgactttgctaccagcctctggcctctctcttcacagggctgctcgtgctgcactgggaggccaatggctcctcatcctggggcttcaatgcttcggtgggctctgcccgctgtgggtcagggggccccgggagctgtcccgtcccccaggaatgcgtgccccaggacggtgctgcaggtgcggggctctgccgatgtcctcagggctgggctggcccacactgccgcatggctctgtgtcctgagaactgcaatgcccacactggggcaggaacttgtaaccaggtacaggtgggagagggcaagtctggtgggacagggctggtgatcagggctcccctgagtcccttgtcatcccccagagcctgggtgtgtgcatctgtgccgagggcttcgggggccccgactgcgccaccaagctggatggcgggcagctggtctgggagaccctcatggacagccgcctctcagccgtgagttgtgggtacccgctgtctagggatggttgctcccaggtcgttctcccacctccattcctgggaccacccctacacccaggcctggcactttgtcctgaccctagcctgatccccaatgtccgcacccacccctaggacactgccagccgcttcctgcaccgcctgggccacaccatggtggatggacccgatgccaccttgtggatgtttgggggcctgggcctgccccaggggctgctgggaaacctgtacaggtgaggactgccctgggcaggtgggattcgcaaataagagaaggtcacctcgggatgctaagagtcacctcagaggagtgcagaaaagcctctaaggtaaaggacagcccaaaggatgctgggacacttgtcacaggaagctcacccggggacacttggggaccagggtacttatttgggtggtgctactccagggaatggcaagaggactgtcataggaaggtcaccccaggggatgcggggacatctgtcaggcagggtcaccttgaaggatgctgggatgactgtaatgaggctgcttttttgcaccctggccccaggtactcagtgagtgagcggcggtggacacagatgctggcgggagccgaggacgggggcccaggcccatcgccccgctccttccatgcagccgcatatgtgcccgctggccgtggtgccatgtatctgctggggggacttaccgctggaggcgtcacccgtgatttctgggtcctcaacctcaccaccctgcaatggcggcaggagaaggtgagcatctctccccagcccactccccagccctcacactgggccctgacagagacagctgtggtagctcctgccagctccatccccagaggaaacagaagccccaaacttgaatttcctcggccatcctgggtcacactgttgtcctgagccagtcctgggctgggacacagcttcactcagcagcagagagaggccaggggagcaagggcttcccaaagccacaccaggcttgagcaggtggaaatgccaaggggcccactgtgcctctgccaggacccaggctggtccgactggccctgggggggtcattccctccttagtacttcagggaggactgtggggggctgaggctcgcttctacccacaaggtgacccctgacctctagccccatcggtgaccttgcccctccatccctcaggccccccagaccgtggagctgccagccgttgctggtcacacccttactgcccgccgaggcctgtctctgctcctggtgggcggttactccccggaaaatggcttcaaccagcagctgctggagtaccagctggcaaccggcacctgggtgtcaggagcccagagtgggacaccccccacaggtggggctggggaccgggaggggacagcccccgtggacctcccgggcatctgggcttcctgtgggctctccatccactgctgtgctctgtggccacctgtctccctctctttcccatccccatgcagattctcagggcaccctcttgaatgttcagattttctgactgtccttcccagactccacaactaactgcccactcccggccacatgtggccaccgtcccctgcccccagggtctgagctccctgcttctcaagggttcttcctcgatcacacctcctttctttgatcactgtcccctagacattctggacgccctgtctccctcccgagagcctggcagaacttactgccagttgaggactcccttctctttcccagagtctctaatgattgtccatttgaacccaactgagagggacgggtggagaggggctcccaggcctccagtctcagggccggggaagggagtggtcaccgaacaggggaccgggaggtcggcggggtcagtgctgttgtcagcccctcccccagcctgtcaccctgcccctcaccaggtctctatggtcactctgctgtctaccacgaggccaccgactccctctacgtgtttggggggttccgattccatgtggagctggcggccccatcccccgagctctactccctgcactgtcctgaccgcacctggagtctgctggccccttctcagggggcaaaggtcaggaaaagaggctcagacccaaggatgtatggggcaggagggaggggtcctctttcccagtgccccagggactggctccatcccagattcctgcttcccctcctttctatgttccctaactaagcgacacccccacatctcccccgcttccatccctgatttggaggagagaacccgaggccaggaggtcagaggcatgagttctgcccagctctcccctgagtcttggtgcggccctggcaggccccttccccgtcctgggtttttccactcgtataaaccaggactgaggctccccgctctttctgccttcaaggccaaggagaatgtgtgtgggagggcagggagccctgtctgcactggttagagaggctggtggtttcagtccacacgtttccaagcccgtcttggaggcagggggctagaagcaagagactcgaggagcctcaaccccaggacgcccccactgtcactagcgagatcgtatgaggaatgtgcgtggctcatctcggggtctgggccaagttcctggggagcagcctgggtcatgggggttccgggaagtcaggaagaagatggctctgtgggctgctcttgctggtacaggaggtttcctggaggaaatctcacctcacctgaaggaggtgagatttgaagagggttaggattgggtgggctggtagggggggataggtagggaagtacaggggtggctggagggctaagagggagcagaggacagctctgacaggctgtcctgtccccccaccccccgtctccccaacagccccgcccccggcttttccacgcctcagccctgttaggggacaccatggtggttcttggggggcgctcggaccctgacgagttcagcagcgacgttctgctctaccaggtcaactgcaatgcctggcttctgcccgacctcacccgtaagtccccattgtggctcccaggaggctgagggacatccaggaggagccccatccccatcctgggactcccactccttaggagtcactgggcccctgcagacccactggcagagctcccgctcttctggattatctgaacaccaggacatgccctccttccttttttttttcttagagaagtttattttttactctgtaaaagtaacaatgttcactatatataatttgtaaaataggaaagaaaaaaaaacacccataatccctctctctagagacaaccactattagacatgggggtgtttcctaccagtctttgctgttcataggtagaagcatgcctgtcacttgcctttttatttcaatgttgtgagtgactgttgtgagtgtgtttctgggactgtctccttttctttttgcttctctctctgaccctttgtctctttttctatttttattagcaacagggtctcactgtgttgcctaggctggagtgcagtgatgctatcttggctcactgtagcctctgcctccaaggctcaagcaagcaatcctccctcctcagcctcccaagaagctgggactacaggcatgccaccacgcctggataattttttttttttttttttttttgtagagacagggttttgctatgttgcccacgctggtcttgaactcctgggcccaagcagtccacctgcctcagcctcccaaagtgctgggatttaattccctttttctcttaatctgtcttttcagattcagtagacagagactacttcatgtctgtgtctctcagttattttttgaggatttaaaaaaattgaggtgaaagtcacataacataaaattaaccatcttaaaaatacattggctgcagcctgggtgacagagcaagactctttctcaaaaaaaaaaaaaaaaagcattggcatttagtgccttcagagagttgtccagccgccacatctatctggttcgaaaacatttgtctctcttcttatttccctctttgtgttcctttgttgtctgcttgtgtctctctccctctctttttttttgcttgctgtctatcctcatgtgtttcctctctgcttctgctgtttttttttttttttttggagacatggtcttgttctgttgcccaggctggagtgcagtggtgcaatctcagctcactgcaacctcaacctcctgggctcaagtgatcctcctaatttagcttcccaagtagctggggccacaggtgcgcaccaccatgcccagctaattttttattgtttgtagagacggggtctttctacgttgcccaggctggtcttaaactcctgggctcaagcagtcttcctgcctcagcctcccaaagtgttgggatcacaggtgtgagccaccgcccttggccttgtttctgctgtcctttgaccctgtgtttctcctctttccctgcatccttctctgactggcatcatggtgtgggtctcttcctggagtctcctgctctctatctgtctgaatacaccatctttcctcaggctcggcctctgtggggcccccaatggaggagtctgtggcccatgctgtggcagcagtcgggagccgcctgtatatctctgggggtttcgggggagtggccctgggccgcctgctggcactgaccctgccccctgacccctgccgcctgctgtcctcacctgaagcttgtaaccagtctggggcctgcacctggtgccatggggcctgcttgtccggggatcaggcccacaggtaaccatggcgaccatgacaggcagtggggagtggagccctctaatgggggtcctgtgctaggccacaccaggatggaggcctcaggagtataccgtctggttcaggaaaggggtgaatcaccgcaggcagggtggccgggggagctctgagtggggatccctgcctgggactggggtctcatgcaagaatgcttgctggaggagctgggtctgaactgggccttaaaagaacggtagagttgagaccatcagtgattcagaagtgaggctgagaccggaagctggagggggtcagctcagaaagggcttcccatgcctggcagaggcactggctctgtccagctccacagatccttcagctgcggttccaggaatgcagacatcctggacactgaaagtgttttcttaggcttagcacagactcacttcgctgcccagtcaccctcactgatatgaggctattagttggccttatttgcccgaagggtgtgttgtcagttactacaggaatgttaatggtttgatttcggagtgctccttaccccagaccccactggaggtattgtgtaacagtgggtacacccactgcttttctaaaatccagaacagtctgaaacgtgtgtacctcttgggatttggggtaagggattgtggaccccccctgtgcaggacagggagccatggaaggcctgagcaggacagggcagggacgggcctgggcagtgagatccctggcgctgttgtgaggggtagagtgacgagagcctgcaggtggggaccaggttgggcaaggggctgcaggggtggggaggaggggacggtcagggagaaatccaggaggcagaaggcttcggtggctgcatgggcaggaggacctggggtgtggtccagcgtctccagcctgggtgacaggtggatgtgggaccatctattaccaaatggtggtggggacagccaggctcaggaggcctgtgctatgtccagcttgggatgcagggttgggggcctgcaggacagtgtctgggaggcagaaggagggggtctggatgggtgtgagtgagccaggcctcatgtcctttaggctgggctgcgggggctccccctgctccccaatgcctcgctccccggaggaatgtcgacgtctccggacctgcagtgagtgcctggcccgccatcctcggaccctgcaacctggagatggagaggtgagtggtggggaaggcagggatgagaagcagcaggtgtagggcagggaggtcctggtctccactctggtcagctgtcccacccaccccagggtctcaggaaccaccgagttctcagctggctcaggaggggtgctgagggtcccatctagcctgtcttccctcaccaggcgtccaccccccgctgtaagtggtgtaccaactgccccgaaggtgcttgcattggacgcaatgggtcctgcacctctgagaatgactgtcggatcaaccagcgagaggtcttctgggcagggaactgctccgaggctgcgtgcggggctgctgactgcgagcagtgcacgcgggagggcaagtgcatgtggacgcggcagttcaagaggacaggtgagcagtgggcctagttcctgagaggggagtcttggggcctggactcctgggtctgagggaggaggggctgggggcctggtctcctgggtctgagggaggaggggctgggggcctggactcctgggtctgagggagaaggggctgggcccctgatctcctgggtctgagggaggagggactggggcctggactcctgggtctgagggaggagaggctggggcctggactcctgggtctgagggaggaggggctgggggcctggactcctgggtctgagggaggaggggctgggcacctgatctcttgggtctgagggaggaggggctggggctggattcctgggttaagggaggaggggctgggcctgagctcctgggtctgagggaggaggggctgggcttgcgatctcctgggtctgaggttctaatccccgtgccccacccccaggggagacccgccgcatcctctccgtgcagcccacctatgactggacgtgcttcagccactctctgctgaatgtgtcccccatgccggtggaatcatcacccccactgccctgccccaccccttgtcacctcctacccaactgtacctcctgcctggactctaagggagcagatgggggctggcagcactgtgtttggagcagcagcctgcagcaggtactgcacctggccaggaccgtgccaggcaagggcccgggcaggtctccctcctctctgcgctggcagggacctttcttccaccatctcctccaccctcctccttccatctccctggctctagctgcagtcgtgcttccttctcgtgccaccatctctttcctccctcgttgcctcatgagggtccctgttgtgtcctccagccatgcttctgtgtgtgccactttcccaacccctggcctctgcctctccaactcttgtccatggtatcatggtctcctcatcctttccatgactttaaaaaaattttaatttaattttttgtttttaattttgtcgatataattcataggttcacatccacgactcttaatgcttcttccttcaacctcccaaaccttttctgcttccctcctctctctctttctctctctacttatggaacttttggttataagaaacagacactccctcgagctggttttgttataaggaagtgtgggtatttgatggactctgagagcaggaagtgtttctgctctgttgctctcaggccacatgacccgtaatctcagctgttctccacacttctccattgtcgggtttctgtcggtctgatagtcaacacacatggcctcagattgcagccttgactcccagtctagatgccttctaattccagagaccacgttcatctctgtgtttgtcggttagctcacattctcgaggagaaactctgacttagtgcacgagctacatgtccagccttggtgtagtgggatgtggccagggagggctaggagcacgtggttcaaacgtggcacgtcagatctaggcctcttctaggctgtggggtggagagatgattcctgaaggtgggtgtggcctaggcaggcatgtgtgtacccgtgacagtccaccccttggagtgcctggcacatgctctcttgtttccagaaactccattccaaagacgcttccacctgacatgattaaactgtcgtggtggcagacaaaggcattcgcaccccaccccactgcccccccgtgggagataagacacattcacctcccactgtcacatgtggaagcaatgtcactcagccagagcccactcctcattcatacctcgattatgcaagacccaattgaggcaaaactgctcaccatccgacaacccatgaactaagtgatcagtccagccaccacccagacactagtagacaacagtgcagggatgtgggacacttgccattttgagaggtggactaaagaaaccaacagcacttcgtggaaattcgagaccaggagggcagggtgtggaggaccaagaatcccacagaccttggcatccagtgccaggagccctgcctgggagtggtacattagctctcacccggaggtagtttgccttgcgatcaaaagctcaggctgtgaagtcagtgggatctgggtttgactccaacttggccacttcctggctgtttgactttggatgagtgacttcccctctccaagacctcagggagagtttgctaaaatgggaatcatttcactagatcctgtcccctagggaggttgtaccagttaaatgggggagaatttacttagagcatagagcaatgcctgccattcaggaagcactaaaaaatggctaatgatcatgatcattgttactgtaatgagcagtggtgagagggccaatctggctgacccaagtcctgccactgggaggattcccagtctccactgtatgggacacaccaagagggtggctgcgggagttccccatgggggctgtcaatgtggccagaagggcagaagcccctgtgattttggtctgtggtaagcagaggcctctcgtctccaagcctgggatcctaatggtagtatgggttctccccagatattattgaaatttccatcatttatctttgtgggagctccagggagcagaaggcatacccacagtcctgcgggcatgcgctgttcccccagcctctcggtgcttgccaagttctcacacgcctgaagagctggggcagctaaggagatgggggagtggccaggagggtggcaaggggaagaggtggggccagtgaattggagagcacagcctgtccccaggggccagatgagcattgttgatggtgtatgtgaatgtgagaggggacttttaccagactttctatgaaacctcctagctttaaagtgatggcttagctgggtggggtggctcaggcctgtaatcccaacacttcaagaagctgagacagattgattacttgaggccaggagttcgagacctgcctgggcaacatagcaagaccctcatctctacaaaaaaaaaaaaaaaaaaattagccaggcatagtggtgtgtgtctgtagtcccagctacttgggaggctgaggtgggaggatcacttgtgtctgggaggttgagactgcagtgagccattattacagcactgcactccagcctgggtgacagagcgagaccccgtctctaaaaaaaaaaaaaaaaaaaaaaaaaattaggccaggtgcagtggctcacacctgtaatcccagcactttgggaggctgaggtgggtggatcgtgaggtcaggagttcaagaccagcttgaccaatatggtgaaaccctgtctctactaaaaatacaaaaattaaccaggcatggtggcaggtgcctgtaatcccagctactcgggaggctgaggcaggagagtcgcttgaacctgggtggcagaggttgcagtgaactgagatcgcaccactgtactccagcctgggtgacagagtgagactccgtctaaagaaaaaaaaagaagtgttggcttagattccaccgcacaaatcaaacataataggcgtgcaggtgatacctgttatgatttggctcaagggctgcctgattctaaccatcccgcattgttctttttttctttttttgaaacagagtctcgctctgtcgcccaggctgtagtgcagtggcatgatctcggctcactgcagtctccaccttccaggttcaagtgattatcctgcttcagcctcccaagcatctgggactatagatgcacgccaccacacctggctaatttttgtatttttagtagagactgggtgtcaccatattggccaggctggtctcgaactcctgactttgtgatccacctgcctcggcctcccaaagtgctgggattacaggcatgagccaccacgcctggcccagcattgttctttttaatggctttggcctgtgagtctggggcaggcagcggagacactccttctctggtctgcctccttcctctcatcctccctccctctcttcagcgaatttatcattgagcaccttctttctgctgggtgctttgctaggcagtggggaatgtcagcagatgagctagagtcctgctctcagaacttatgttcatacaccttttccatgaactcaggaaatgcagtgtatggtgttgggcatctttgcatttggtcactagggagattacagcagaaagtgctgtccaggactgaggattcagggttctctacccctcccagattgtcccaccatctgccaacaagtgccctaaatttagatctggaagcccagcccagcagagaatttgcctctggcagttcagcaagtctcagtgatttgcaggcccctcagtgggctcagagctccagccacagcagtcagggttttctatttcaggattccatggttgctttgccttttcctaagtgctttcaggcagccggcccaaattaacctctttcctcttattcttcacttatggcccaagcaataaataaagtgccttatacactgaggtaagttcccaagagcctgaatctcattgtgcacgtttttggggtcctgacatacaaatatggcttgtgagttgctacccagcccctaaccaaggactcttcaggttctcagtgtggggtaagagaagcctttttgcctcagcagccacatttgttctttttcttgtcttttctttctttcttttttttttttttttgagacggagtctcgctctgtcatccaggctggagtgcagtggcgcgatctctgctcactgcaagctccacctcccgggttcacgccattctcctgcctcagcctcctgcgtagctgggactacaggcgcccgccaccacgcctggctaattttttctatttttagtagagacagggtttcaccatgttagccaggatggtgttggtctcctgacctcgtgatccgcccgcctcggcctcccaaagtgctgggattacatttttctaagaaactgtggtttgcaaccccactcctgatactcttttctgtctccttctgggaacattgccattgttcctttacctggaagaaacagaagtgcccttagtgaggaggggaactccctccaccaatgcagtagtacctgttggaacccaggatagaaagtacagcagggcctcacaaggaactggagacagactggaaagctgcctttctatctgtctttagggcacgtggttctcatctctgtctctttctgcagcctgctcttttcctgcctgtctgcgtcctctttatttaatcatcatttgcttatctaaacaatcccttcaacccaagtctacgcgatcttccagtttattttctttttttgagacagagtcttactctgttgtccaggctggagtgcagtggtgcagtcatgactcattgcagcctcaaactcccgggctcaaaaaatcctacctcagccccccaggtagctgggtctacagatgtgtgccaccacacacagctaattttttatattttgtagagatggtgtctcactgtgctgcccaggctggtctggaactcttgggctcaagtgatcctcccactgtagcctcccaaagtattgggattacaggtgtgagccactgcggccaggcaaccttccagtttcaagatcctccccagcctgacttcccgccttggtgtgtagttacaaacgcttgagagggaaaacatgatgaccccagctagtgtccactttgctctacctgtggccagggaggggtgagacctcaaagagggtgtggtctgggaagatacccagaatgtgtttgtttaagcttatttccccatctctctcttccctgcatccccatcccctcccccccatacagtgtctgagcccttcctacctgcccctgcgatgtatggccggaggctgtgggcggctgctccggggacctgagagctgctccctgggctgtgctcaggcaactcagtgcgccttgtgcctgcggcgcccccattgcggctggtgtgcctgggggggccaggatgggggtggccgctgcatggagggtggactcagcggcccccgtgatggtgagagggctttgggcactgggggagaggggctggcccttggttggggtctgatacagtgaacatagggatactgggccagacccagaggtggggctcagaggaggcaggagggagggcctaggcaactggggcaggtggtacagaggtccaggtaaaatgctatatccccggtgctagggctgacatgtgggcgtccgggggcctcctgggccttcctgtcctgcccccctgaggacgagtgtgcaaacgggcaccacgactgcaacgagacgcagaattgccacgaccagccccacggctatgagtgcagctgcaagaccggctataccatggacaagtgaggccgcaggcggcgctggggccaggcaggctagggtgggagagtctgtggggagcagtaatggatgaggcctagagccaagcaggacagaagaaaagaaagctcgaggcatgaaggcagtgggattgattcctgaaggtcaagagtggtgaggctgagcagggaagagtgagtttcatagggtaccccaatggccgggcacagtggctgatgcctgtaatcccagcactttgggaggccgaggcaggtggatcacttaaggccaggagttcgagaccagtccacagggagaccccatctctacaaaaaaataaaaaagaaaatagggtaccctcaaaagaggagagagggttgtgggctacacctggagggggtggtgggctagatcctgaagagaagatagcaacgggacagagcagggatgagcaaccagttgagaagagggtggggtagttggttgggtgctaggccatgaagccacgaggagggtggccacctgccctgacccccactttgcccctgcagcatgacagggctgtgccgccctgtgtgcgcccagggctgcgtgaacggctcatgtgtggagcccgaccactgccgctgccactttggctttgtgggccgcaactgctccacggaatgccgctgcaaccgccacagtgaatgcgctggtgttggggcgcgtgaccactgcttgctctgccgcaaccacaccaaggtgggccgcccggagcctcagacccccgaccctgggacccaggccctcacttgccttcatcccacgctcaggcggctcgcatctcatcctgagccctgataagccagggacagataagccagagccctgtcccagggagatgtgtggagacttgggggacgctgcctgggtttggatcccagagggtctgccctggaatagtggacggagtgggtgctgcgccaggaggacaggcacgtggaggaggatttgagataatggagggaagggcttttgaactcagcactttgggctgcaggtgtgcaagggaaggcgggggctaaatcccgctgggattgtccaaaccaggtacccgagcctctgctgccctcccgtgggctctcagaacctgcccctgtgcccccaacgccctcctacccctgatgactctccagcctctctaactaccctgtcctgggttctcagggcagccactgtgagcagtgcctcccgctgtttgtgggttcagctgtcggaggcgggacctgccggccctgccacgccttttgtcgtggaaatagccacatctgcatctccaggaaggagttacaaatgtccaagggagagccaaagaagtactcactggacccagaggaggtgaaagagaggggtcagatgcctgggtctgagggaggaggggctggggagctcctgggtctgagggaggagggggctggagacctggacccttgggttgagggaggaggggctggaggcctggattcctgggtctgagagagtagaggtgggggtcttgaactcctgggtctgagggaagaggagctggggcctggactcctggatctgagggaggagggggtgggagcctggcctcctgggtctgagggaggagtgggtaggagcctggactcctgggtctgagggaggagggggttggtccaggcctttctatgatcacactgtccttccttggccagattgaaaactgggtgacagagggtcctagtgaagacgaggccgtgtgcgtgaactgccagaataacagctatggggagaaatgcgagagctgcctgcagggctacttcctcctggacgggaagtgcaccaagtaagaggaaccgggggggggggggggggggggggggggggaggccggggatcccacccttctcactgggagtagctctggagccaggccccctctttagtcctccacccccagtcaggagaggatgacatccccagggagcgcccaggctggggtcagggtagggaaggagctggaatgtgatgccactccctacctccaaggctagtgctgaagtgcagtccacagagcggccccatcgagaacaagatggggcggctgagggcagaggccttggaacaacctcccctttccatctccttctttctgagtgttcagtgagtgctggagtctgtgcaactcgggttctaatcccaatggtaatttaactgctttgtggccttgggcaaacagcttgacctctgtgaacctcagtttcctcttctggcctgttgcacagagttgagctcacatatggggtgtccatcctggaccactgcaggccatgggggctccgtaaccctcaacttcttccccagatgccagtgtaatggccacgcggacacatgtaacgagcaggatgggacgggctgtccatgtcagaataacacagagacgggcacatgccagggcagctcccccagtgaccgtcgagactgctacaagtaccaggtgcggctgcagaagctagtggtgggccgagggccctacaccttgtggaggtcagggctgggatgaggtagccaggctcgggcaggactgacaacatggttccaaatcagtggttttgggatcaagtgcagcttgacagactgttcctgagccccattcagttacaggccctaggcagtgatgctggggaccaagatatgagcctctgggggactctcagactggtggggagacagtctccattacaggtagtcacagctaaaggtggcacatgccagaaaatctatcccatggtagctcaaccgaaaaaagaaaatgggctgggcatggttgctcatgtctgtaatcccagaactttgggaggctgaggcgggaggatcacttgagcccgggggttcaagaccagcctgggccatatagtgcaaccccatctctgaaaaaaaatttaaaaattagcctggcatggtggtgcacatctgtggtcccagctacttgggaggtggaagtgggaggattgcttgagcccaggaggtcgaggctgcaggactctgtctcaaaacaacaacaacaacaacaacaacaacaacaacaaacacacacacacacacacacacacaacagaagaaaagaaaatgtattgactcttagaactgagggtctggggtctgccttcaggactggctatatccgggtgctcacacaatgccatcagaagtctctctgcatcttgactctgctttcctctgcattggcttcattttcaggcagattcttcccagttggcagaccccctctgatgaactgaggctagcagagatctcatatcatttaatacccagattcaaattcccctcgagtgcatttccctttttcttctgcacagaggctcctggagtgcctgcactggccacctggctggctgctgtgttccagacttgcctccatgatgtcccaggctccttcctcagaggacaactcccgccacctccccgccaccttctctctccagtcccagagggaagagaaagtcccttgctctcagtcttccttacccatctacagaaacataatagctgcaaacataatagctgccaccccaaatggcaacagttttacaagccttactgacccttaacatttctatcctgggccagaatttctgcttttttattttttttttaatttttaatttaatttaattttttttggacacagagtattgctctgttgcccaggctggagtgcagtggtgggatctttgctcgaggcagcctccacctcctgggttcaagtgattatcctgcctcagcttcctgagtagctgggactacaggcgtgtgccaccatgcctggctaattttctgtattttagtagagatggggtttcaccatgttgcccaggctagtctcaaacttctgagctcaggcaatccacctgccttggccccccaaagtgctgggattacaggcgtgagccaccacacccagcccagagtttctgctttcttgataagggaaaggcctattggcttttaccagggagtctcagagattaaatcagacctcctcctctaccaggtctgttggctgcttagaagtagcagtttttcttggttcctttttttttttgagacggagtctcactctgtcgccaagctggagtgcagtggcgtgatcttggctcactgcaacctccgcctcccaggttcaagcgattctcctgcctcagccccccgagtagctgggactacaggcacgtaccaccaccccccgctaatttttgtatttttagtagagacagggtttcaccatgttggccaggatggtcttgatctcttaaccttgtgatctgcccaccttggccttccagagtgctgggatcacaggcgtgagccaccacccccggccggttcttttttttaatgtatttatttttaagacagggtctggctctttcacccaggctagagtgcagtggtgcaatctcagctcattgcaacctctgcctccctggtttccatcatcctcccacctcagcctcctgagtagctgagactacaagcatgtgctatcatacctggctaattttttttttagagatggggttttaaccatgttgcccaggctagtcttgaactcctgagctcaagcaatccactcaccttggcttctcaaagtgttgggattctaggcgtgagccaccgtgcctggttgggcttttgggtttttttttttttttttttttttttgatacagggcttactctgtcacccaggctagagtataatggcgcaatcatagttcactgcagccttgaactcctgagctcaagtgatcctcctgcctcagcctcctgagtaactgtaactataggcacacaccaccatgcctggctaattttaaaaaaattttaaagacgggggtcttactatgttgcccagactggtctcgaactcctgggctcaagcggcactcctgcctcagcctcctgaagcactgggattacaggcatgagtcactgcgtctgttttctcttggttctaatagtgattgcagtaataactagaatgccaggagcgcctgccacagagctggatgctgtgctgtgtagacagtggtgacagcatagatatgaaaggctttgcaagactgtgctggggcctcagtggggtacagacttaagaggaagacagattcagagacattaaatgtcctagctgggcacagtggctcatgccagcactttgagaggctgaggcgggcagatcacttaaggtcaggagttcgagaccagcctggccaacatggtgaaaccccttctctactaaaaatacaaaaattagttgggtgtggtggcggacacctgtaatcccaactactcgggaggctgaggcaggagaatcgcttgaacccgggaggcagaggttgcagtgagccgatatcacaccactgcactccagcctgggcaacagagcgagactctgtctcaaaaaaaaaaaaaaaaaaaaaagtctcaccccagatcaggtggtcagttaggcttggtgcctggagtgaccctggtctgatctcagaacttgagtggtttccactaagccacaggaatcatagccgttatctatccagccacacattcattcagcacacagtcattgagcacctagtatatggcaagcaccgtgcaggttgctggggacacagtagggaacaaagcaggcaaatgttctgtctttaggagtttgcattctcatggaggcatcagaaatgaacaaacaagtcagatgctcgtgtgttagacagcgaggagcgctaaggaaagttaagtaggaagcgggggctagggctgttggggagtgggaatggtagacgcaggacacagtggccagggaaggcctaggtgagaaggaggctcttgagcaaagatctgaaggaggcaagggggcttgacaagctgacaagtgacaggagaaccatgcaggcagagggtccgccagtgcaaaggccccagggtgggagggcgcctggcacagtatagaagaagcatccaggcaggcaggcgaggctggctgaccctgcgccgagtgccatgcacatgatctcagtggtcctgtgagcgagccgtggttactccctgtgtgcagagctcatgggttaagtctgtgtgctcaggctcagtgaggttaagtcactagtccaaggccacacagctaacaaggaggtagagccagaatgcagccgcgttcttcactgctgtgcctcagagtgccagaggcctcagtatcagggtgctcaggtcactagggtggcaccaggggcagcagtgctggagtgccaggtcctggcaaggtctacactgtggcagagaaggtccggggggtcacagggaagtgactggggcagtgggggtgaggcccagggcaatggctacttagcagtgggtatagagtattcgtcactgctgcttgggggacaggctggcaccgcactcagccctgatggtcaccgcctctaaccctgcccgcagtgcgccaagtgccgggaatcatttcacgggagtccgctgggcggccagcagtgctaccgcctcatctcggtggagcaggagtgctgcctggaccccacgtcccagaccaactgcttccatgagcccaaacgccgggcgctaggccccggccgcactgtcctctttggcgtgcagcccaaattcaccaacgtggacatccgcctgacgctggacgtgaccttcggggccgtggacctctatgtctccacctcctatgacaccttcgtggtccgtgtggcccctgacactggcgtccatactgtacacatccagccacccccagccccaccacctccaccaccccctgcagatggtgggccccggggggctggggatccaggaggagcaggggccagcagtgggccgggcgccccagcagagccacgggtacgggaggtatggccgcggggcctgattacctacgtgacggtgacggagccgtcggcagtgctggtggtccgcggcgtgcgggaccggctggtcatcacctacccacacgagcaccatgccctcaagtcgagccgcttctacctgctgctgctgggcgtgggagacccaagtgggcccggcgccaacggctcagccgactcgcagggcctgctcttcttccggcaggaccaggcccacattgacctgtttgtcttcttctccgtcttcttctcctgcttcttcctcttcctctcactctgtgtgctcctctggaaggccaagcaggctctggaccagcggcaggagcagcgccggcacttgcaggagatgaccaagatggccagccgccccttcgccaaggtcaccgtctgcttcccacctgaccctactgccccggcctccgcctggaagccggctgggctcccacctcccgccttccgccgctctgagcccttcctggcacccctgctgctgacaggggccggtgggccctggggacccatgggagggggctgctgcccaccagccatccccgccaccactgctgggctgcgagctgggcccatcactctcgagcccacagaagatggcatggctggcgtggccacactgctgctccagctgcctggcgggccccatgcacccaacggcgcctgcctggggtcagccctcgtcacactgcggcacaggctgcacgagtactgtgggggtggtgggggtgctgggggcagtgggcatgggactggtgcgggccggaagggactgttgagccaggacaacctcaccagcatgtccctctgacatgcccagggttctcatccacagcagctgggtcacctgatagggccgccctggacttggggtccctccacctgggggcccctggacactgtctacttggagaccactggcccccttcccccagggttgcccagatggggcctcctttgttctgcattcagcagctatttatcgagtacctactctgtcaggcactgtcataggcgtggggcaaagcaggaaccaagagacgaggttccctgatctcatgggacttaggttctggtgaagggagacaatcagtgcacatgcacacaccccacacgcatacacacatgaacacatgcacatgtgcacacacaagtaagatggcttcagagagggagaagcactgtgaggcctccagaggatgtggcagtgagggacgatggggtgaagtcagctgggcattcaaagaagctagactgagaacgcctgagaagaaccagctacgggaagagctttgggaagcaaaggcagaggccctggggtgggagcaggcttgttttattggaaggaccagaaaactggtaagtgtgacccagatcaagtgtgaggagatgaggctggggatagtcaggggctggatcacccagggccttgtgggccccacatagggttttgggttttattctcagggcaatgggaagctgttggatggtttgatgaaggggagtgacaggatccgatgtacctatttaagaatttaagagggtcgggtgcggtggctcatgcctataatcctagcactttgagaggccaaggtgggctgatcacaaggtcaagagttcgtgaccagcctggccaatatggtgaaaccccatgtctactaaaaatacaaaaattagctgggcatggtggcacacacttgtagtccgagctactcgggaggctgaggcagaagaatcgcttgaacccaggaggcggaggttgcagtgagctcagattgcgtcactgcactccaacctgggtgacagagcgagactccacctcaaaaaaaaaaaaaaaatttaagaggtcactcagttgtgctgtggagaatggaccggagggacaagaggggcagcagggatggtgggctggagtagggtgctggcaatgagggagtctggctcagatgtgggatgtgtatggaagaatataaatgatggtgtggatgtcagggtgagggaggagacaaaaccacgatgacccctagctttgtggcctgaactgtgggtggctgaggggatcgttaattgaatggggcagactgaggcttgtgaggaagatcagagtctggttcttgacatgagatgcccttcagacatctcttcactcaggtccaactagggatacagaaacactgaatatttcaacagcagaaattgaatggggggattgatagcgctggcgagggaagcagctggaaagagacagatggcaccctgagacagcccagaggtgaataggacccccaggctgcagggataaagctcagtggtggtgttacctcaccggggaccagggtcacacagcaaagctggaacaacagaggcgtgttgtgggggagcctcagaggggacaaaacctctgcctgagatcccaccccaggtgggcatgggggccactgaggttggggatgaaaatgccggtaccgtcagtgcacagccctgttccagacagtgctgcctggaagatttctgggctctcctgaggcgccaccccgcacctgagccacctccttggactcctgtcctctaccccttgaggacctccctcccttctaccctagctgtcttcttgaacttgggactctcctttcccaagacttccatcactagctcctggagggactggactttgcatcttcccttcgcgtggagcctcagtgtgagaggccctagccaatgcgtgcatgtcagaggtggtggggaccacatcagaagaagaggggggtgatgaaattaacaaataaaaagtatggggaaaacccaggtgtctgagcgcgtctgcacatgtcccagcagggctaggtctcaactctgacccagccccgcatgctggataacttggataattgcccttatgatggtgccacttccaagctggggtggctttgttcctggctgcccctcttaaagggggaagggggaagggggaagggtatgccccaacagaagcataataaataccaataaacagctcttgtttcccagaagggacgcgctgagggcagacgtgggcagtggaatttgacccttccctagatcttcctcagggaaaccccagtttggctcaggagggaaaacaggctgccttggtcccagctacggctttttgttgttgttttgttttgctttttgaggggacagagtctcactgttgcccaggctagtgtgcagtggtgtgatcttggctcactgcaacctctatatcccgggttcaagtgatttgcatgtctcagcctcccaagtagctgggattacaggcacgcgccaccatgcctggctaatttttttctatctttggaggagacaaggtttcaccatgttggccaggctggtttcaaactcctgacctcaagtggtccgcccaccttgactcccaaagtgctgggattacagtcatgagccactgcacttggcctttttctttttttttttgagacagggtgtctctttttctgtgacacaggctggagtgaagtgatggaatcattgctcactgaagccccaacttcctgggctcaggcgatccccccacttcagcctcccgagtagctggaactacagacgtgtaccacctcacccagctaatttttgtaattttggtagagatgaggtttcaccatgttgcccaggctggtcttgaattctggagctcaagtgatcctcccaccttggcctcccaaagtgttgggattataggtgtgagccaccatgcctagcccaggcacagattttattctgggccccaatagaagggttcaaaccagacagggctgagaatgaaatgagaccctagcacaatgagctttctttttttttttttttttttctctgagacggaatctcgctctgttgcccaggctggagtgcagtggtgcaatctcggctcactgcaggctctgcccaccgggttcacgccattctctcgcctcagcctcccgagtagctgggactacaggtgcccaccacctcgcctggctaattttttgtatttttagtagagacggggtttcaccgtggtagccaggatagtcttgatctcctgacctcgtgatccgcccgcctcccaaagtgctgggattacaggcgtgagccaccgcgcccagcccagtgagctttctctaatccattagagtcacagtcaaaaccgaaagcatcatgagagctgctttacctggcatgcacctaggcaaacaaaatccctgattcctcccaggtgggagctggagatctctgtcctctccatcagcctcagcagcataggcatcttgctgggtgtgttaaacaatgtatcttttctgcacatcccggctccaaagtgcaagctggtttcttcatcaggtgctcagcggaggacgatgtgtgggacccagagggtgtgtgagtctccattatgggccaggaataacactgtattttctttttcttttttttcggagatgctcttgcttcgtcactcaggctggagtgcagtgatgtgatcttggcgcactgtagcttcaacctcctggggtcaagtgatcctcccacctcagcctcctaagtagctgggactacagatgcacgccaccaggcccggctatttttttttggtatttttgtagagacaggttttcgctgtattgcccaggtttaacatggtatcttcatactttgtgggcaatttaagggatttccaggggttaccttgacctcacgtgagttttgcctttatgagctattagtagcacctaccctccaggatatgatcgtggacttgcatttatatgaactgagcagcacatgctggacagtttgcatagcatactgctgtggtttcatttggtctctccagcaatcatatgaggtcagtaacccgtaatccccatttgcagatgagaaaacaaaaggtcatagacatggtttagctgttgcatgagagctgtcaattgactctcagacctatgtgcctgaccaccaggctcttccacctcccaaggaaggaccccttaaattaggtcgacatagctgaaagctgtcccagcacacgtttagaggtgatgccacatgactacctgtacctcacagcaggaagggtgaggcttttccaagcatctgtaaccacaaatcaaaagggtcaacagtccacctcactcatgcctgtaatcccagcactttgagaggccaaggcaggcggatcacgaggtcaggagttcgagatcagcctgatccacatggtgaaaccctgtgtctactaaaaatacaaaaattagttgggcatggtggtgggcgcctgtaatctcagctactcgggaggctgaggcaggagaattgcttgaacctggaggcagagtttgcagtgagccaagattatgccactgtactccagcctaggcgacagagcaagactctgtctcaaaaaataaataaataaaaataaaaataaataaataaaagtacaaaaattggctgggcgtggtggcgaatgcctataatcccagctacttaggaggctgaggcaggagaatcgcttgaacccgggaggtggaggttgcagtgagccgagattgcaccactgtaccccagcctgggcaacaagagcgaaactccgtctcaaaaaacaaaaacaatagccaatttctgctagggataatgcagaatataccaactagaaagctaaggagtgtgagatttgctgccctgagagagggagtcctgagggcttggagttccacctgcatgagcagaaaggagctaagattctttaggactcctctgtgttatgcgtggacctctcaggtgaagtgtcttcctagcagtcatcctgtgactttgccctcctaagcagatgatttgcaccacgactgggccttttctctgggatgcatagccacactccctccgactctcacaagtgctctatggtacgtgttcctccctccacgtcagccctctgccgtcacttctccctgcacatacctgagtgcaagtggcgtatgctgaggtgggagagagtctgggcatggaaggctggatgcctggttctaggctatgtgcagctccaaaccccctggggatttcagggatagagggaatattttactgagggcctacagccctccaggcactgtgctgggtgcttggtgtgaatcttatcttgccaacatcactgggaggtgccagcttggttttccattttgcccattcgaaagctctgttgactaagaactcagggctaattaagagacgagccagattgtgacacaagcctgtctctgttgccccacacgttacctccaaagttgctttccttttctaagccaatgtcttctgattgcctagaatgggccccgcattgtgctgggggctggggacagagtagtgaataaggtctctgccctcatggagctgataagccagtgtggtgcccaataataagtaaatgatgctgcatgctggaaagtgatcagaaaaggcagtgagagagcaggcgtttggcacttgctattttgcttttttttttttttgagatggagtttcgttcttgttgtccaggctggagtgcaatggcgtggtctcagctccctgcaatctctgcctcccgggttcaaacgattctcttgcctcagcctcccaagtagctggtattacaggtgcctgtcaccacacctggctaattgttgtatttttagtagagacagggtttcactatgttagccaggctggttgtgaactcctgatctcaggtgatgcacccaccatggcctcccaaagtgctgggattacaggcatgagccactgcacccggcctgagacttgctatttaacataggtgggatgggaaggcctctcttgtaagacgatacatgagcagaaattagggagtgagccagagggacatttgagggaggagcaattccaggccaagggaacagccagtgcaaaggccctgagttggagtgtgcctgacatttcagagaaacaagactcatgtggttggagcaaagaaggaataaggggagatagggagacaaggtcacagagggaacaagagctatgtcctgtaggtccctgcaccacggtgaggactcaagcttccactctgtcagagatggcaccatgggaggattctgagcttgggaagaatgagctctgacgtaggtgttcacaggattcccctgggaggaagaggctaatggggtaggagagggtgggaagcccatggaggaagcccctgtgtccgtgttgaagaggagagtggctggaacaaggtcgggatagcagagtggagagaagtggtgagattctggatatattctgagagcagaaccagcagaatttgttgacagattggacgctgggtgagagagaaagtgactgagcaacggaacgggtagagtttgctctttcctggcatggcaaagactaggcagagtcagtttgggggttggggtacatcagcagttaggttttatatatgttaaatttgaggtggctgttagataccccgagggaagatgtcactcaatgagtggatacagctccagaaagagagagggagagataacagcaaataatagtaatatattaatattagaataggccgggcgtggtggctcacacctgtaatcccagcactttgggaggccaaggcgggtggatcacgaggtcaggagatcgagaccatcctggctaccacagtgaaaccccatctctactaaaaatacaaaaacattagccgtgcgtgatggcgggcgcctatagtcccagctactcaggacgctgaggcaggagaatcgcttgaacccgggaggcggagcttgcagtgagccaagatcatgccactgcactccagcctgggcgacagagtgagactctgtctcaaaaaaaaaaaaagatagttactatattatacatattatagtaatattaacaatgattttggccaggtgtggcggctcacccctgtaatcccagcactttggtaggccaagataggcagattgtttgaggtcaggagtttgagaccagcctggccaacatggcgaaaccctgtctctactaaaaatagaaaaattagccaggcgtggtggcacacgcttgcaatcccagctacttgtagggctgaggcacgagaattgcttgagccccggaggtggaggttgcagtgagctgagatcatgccactgcattccagtttgggtgacagagcgagattgtcttaagaaaacaaaaaacaatgattttgttttgttttaagacagggtctctctctgtcacctaggctggagtgcagtggcgtgatcacagctcactgcagccttgactttctggactcaagcaatcctcctgccatagcctccagaatagttggaactataggtgtgagccacatgcacagctaatttttttttttttttttttgagatggagtctcgctctgtcacccaggctggagtgcagtggtgcaatcttggctcactgcaagctccgcctcccgggttcatgccattctcctgcctcagcctcccgagtagctgggactacaggtgcccgccaccatgcccagctaattttttgtatttttattagagacggggtttcactgtgttagccaggatggtcttgatctcctgacctcgtgatccgcccacctcagcctcccaaagtgctgggattacaggcgtgagccaccgtgcccttgcccagctaatttttaagaatgtttttctttttctttttcttagacagggtctcatcttgtgagctcattgcaggcttcaccttctgggctcaagtgatcatcctaccttagcctctcagttagctgggacttcaggttcacgtcaccatgcccagctaatttttttcttttttttgagaaggagtcttgctctgtcatccaggctggagtgtagtggtgcaatctcggctcactgcaacctctgcctcccgggttcaagtgattctcctgcctcagcctcccaagtgcggggattacaggcacccaccaccatgcctgattaatttttgtatttttagtagagaaggggtttcaccatgttggccaggctggtcttgcactcctgacctcaggtgatccacctgcctccgcctcccaaagtgctgggattacaggcatgagccaccacgccccgcctcatgcctggttaatttttgtgtattttttgtagacacagttttgccatgttgcccaggctggtctcaaattcctgggctcaagcgatcctcctgcctcagcctcccaaagtgctgggattataggcgtgactgctcctggctcaaaaattttttgtagaggccgggcgcagtgactcatgcctgtaatcccagcactttgggaggccaaggtgggtggatcacgaggtcaggagattgagaccatcctggctaacacggtgaaaccctgtctctactaaaaaatacaaaaaattagccgggcatggtggcgggtgcctgtagtcccagctactcgggaggctgagacaggagaatggcgtgaacctgggaggcagagcttgcagtgagccaagattgcgccactgcactccagcctgggcgacagagcgagactccatctcaaaaaaaaaaaaaaaattttttttttcgtagagatgtctcgctgtgtcgcccatgctagtctccaaatcctgtcctgaagtgatcctcctgcctcagccctccgaaagcattgagattagaggcaggagccaacacatccagcccacagtgatttgagttcacactttggcctttccctgtgtaccatctcttgttctcacaatagccatatgacatgctagggactgttagtcctatagggggaatcaggttcagaaaggtttatgaattcactaagataacacagctaaatggtgaggagtcaagattagatcccaggtctgtccaattttgagacctgaacattttttgatctgctgttggttgcttttgcaggaaagagggttgattgaagtagacagtccctaaaaattcctttttaggccaggcgcggtggctcatgcctgtaatcccagcactttgggaggccaaggcgggaggatcacctgaggtcgggagttcgagatcagcctgaccaacatggagaaaccccgtctctactaaaaatgcaaaattagctggggatggtggcgcatgcctgtaatcccaactactcgggaggctgaggcaggagaatcgcttgaacccgggaggtggaggttgcagtgagctgagatcacaacattgcactccagcctgggcaacaagagcgaaactacgtctcaaaaaaaaaaaaaaaaaaaaggtccgggtgcggtggctcactcctgtaatcccagcattttgggaggccaaggcaggcggatcatgaggtcatgagattgagaccatcctggctaacacggtgaaaccctgtctctgctaaaaaaaaaaaaaaaaaattagttgggcgtggtggcgggcacctttagtcccagctactcgggaggctgaggcaggagaatggcgtgaacccggagcttacagtgagccaagatcgcgccactgcactccagcctgggcaacagagtgagactccgtctcaaaaaaaaaagaaaaaaaattcgtttttagctccagagagccttaagcttataagttctctgctttggagacaaaagtcccccacgcctgttcgaattgtgtgcaggccaacagtccatagatatggagcaagcaagggcgctctcctgttttttctttgaacttcagtgcctccgtcctcccaagactgactttctggttttgcttattttcagaatgcaggcagcttcaggcagggagtctgcagctaaagagttagtggttttactttgttagggtgagggcaactggggtttgggagggataacttgacaaagtcacacactgcctggcggggtcacacgtaggcatctgtcttgtccccacctctctcaccaatcctctctctccacccagattcctaccctgggacaaaatggatgtaggcggagttggttttcaggtttttattgtgggtgtatttctggcagcgggacaggggtggtgaggcagtccctcccaggagtggccagagaaggccagaggcgagactggtggaaaaggacggggaagacagggaacttccttactctcggatcttcagttcccgcgccatctggcagagggcgcagggcagacaaaaggtgagggccgcccagtcgtgcccgacggagccctagagggtaggagagagcggtcaggagccccgcggtgggtcccaggaggccagtccccagctccctgctcccgcgggtccccagcccggcgcgcacctggatgtggtagcgctcccgcatgccggtgcggatggagtgcaggcctccgggcaggtagggcgcgcagcagcactcgccaaagtcgtcggagatgcggcaggcaaggcacagaggagcaaaagtgccgcacagacctgggcggggcgcaggcgctcaggggcggggccagccggggcctcccgacggctccgccccggggggggcgcggttgattcgccgcggaggggcattgagggtcccagccaaggagaggtcccagagggaattagaggtccgaggagaggatggcttagcgattggaaggcagggtttttctttttttttttttcttctttttttttttttttagaaattggaggctgggtgcagtggcttacgcctgtaatcccagcactttgggaggcctaggcgggaggatcacgaggtcaggggtttgagaccagcctacccaacatagtgaaaccccgtctctactaaaaatacaaaaattagccgggcgtggtggtgtgtgcctgtaatctcagctactagggaggctgaggcaggagaatcgcttgaacccgggaagcggaggttgcagtgagcatagactgtgccattgcattccagcctgggcgacagagcaatactccgtctcaaaaaaaacaaaaaacaaaacaaaaaaaaaaacgaaagaaagaaaaaaaaagaaaaagaaattaaagtctcggtctgtcatccaggctggagtgcagtggtgtgatcacatgtctcactgtagcctcgacctcctgggctcaagcaatcctcccgcctcggcctcccgagtagctgggactactggtgtgtgccaccacctcgggctaattttattttttatttttatttttgagacggaatctcgctctgttgcccagactggagtgcagtggcgtgatctcggctcactgcaacctctgtctcccgggttcaatcaattctctttctcagcctcccgagtagctgagtttacaggcgcccgccaccacgcccggtttttttttttgtatttttagtagagacggggtttcaccatcttggccagactggtcttgaactcctgaccttgtggtccacctgccatggcctcccaaagtcctgggattacaggcgtgagccactgcgcccgacctattttttatttttatttttgtagagatggggatctcattatgttgcccaggctgatcttgaattcctggcctcaagggattgtcatgccttggcctcccaaagtgttgggattacaggcatgagccactgcactgggccaggagctagggtttgaagagggagttgggggtcacagtgaggaaagctgagcatgcaaaggggaggttgagggcctgataagttgagtgtgggaaggcatgaggtagtatcctaaggagtgttgggggtctgaggaaagggtgactgttagagtgggaattccaagtccagggaagggaggtgggagtggggttagcaagcggtgggaggaggttggaggtgagcttccctctcctgattccccccaaacccatcttccaccaggcctggagagggagcaggcaggcactcacagacaggcatgtcgttgcagcagtccgtgagacctgtgtgccagtcactgagctgggtctggtagcagctggtggtggcgcactggggctgactggtcacagggtaggacatagctgcagaggtgggagggtaggggtcagctggcagcctcgcagcatctcctgggccccgcacttcggccacccttccctgtgccgggcagtctgggcggggccgccaggccgcccactgaagggacaccactgtgcctcccccttcccttctgctacatctgggcaccggcaaccccagtctgtccctgttgctgctggctcctgcacgtctggttaggctgggggtgggggtctcctgcacatctgaggaagggtggggaccacatctgggtggggcctggcggtgccgcctcctcctccacgtctgggcctgggttctgggttgcagcatttctggggcctctggggtggaagcaggcgccgtctgtcttcgaagcaagggtgcccaggggagggaggcggccaggttccagtactgagagggttgctggtccacccagcggtcccacctttgcctttcacgttgtcgtgcatctcaaactgcatcttgctggccctgaggaggtggcgttggggacggcagaagtggctgtggcaacagtggcagagtctgtccaagggacgctggatactggggaggtgggggcaagggactggggcactgggggctgggctctcagggggaggggagctggggagaaagaggccaagtcagcctgtcaaccaggagagacatggaatagggaatggatagggcgggggcgagaaactcgcccatgtctttccaactgcccgacagattgcagaggaccctccccatacccgagatagagcttgagggagaacaagaaatggagatggacagagtcagagacaaggggagaaagatcagagccaggtgcccgtagagatgtcaccagtaatgcccacatgtgcccagcactttgactcctctgcaagcccatctcacagatgagcactgaggctcagagacatgaggaggaacgccccacgtctgacggcccaggccaagggggttcatagaggtgatgctgggccccaagacttctaaattcagctcagcacaccccagttaagaaggacagatttgggggcattgggaaggacagagatgtcccgagagaccgacaatcagcgatatgaaaggagacagagtgatatgagtgggatgaggaggagggagaacagagcagaggcgcccaacctcaaagaagagggctgcggaggggatgttcctacctgcaggatcgcgatggcagtgatggaggcagacgtgtggagacacgggcactgacttctccgtctcagcccagagccacttatatgggcggccacgcagccctgggcggggctctgacagaggtgcccagggagccaagccggtctgatcgaccctctccccacactgggatttcccgccctccctctccactcccatccccccacttctcctcctgcctcagctcccaggacccagggaaaagaaggtggcggggggtgggaggtttggcgggggcggggggccacagccgggtcaatgcgcagagaccaaaagagagggagagacagaaacacagtgtcagaaaggcaggcagggaagtccctctagacagaaaggagagagaggagattcagagagatggagagacgcaggaagatgtagagagatggagaggtgccaagaaacagaggggcacaaaaatgtgaaaagaaataacaagaagaggggagatgggccaggcatggtggctctcgcctgtaatcccaaccctgtaatcgcctgaggtgagaggatcgcttgagcccaggagttgaagaccagcctgggcaacatagggataccccatctctacaaaaaatacaaatagaattagccgggcatggtggcatgtgcctgtagtcccagctacttgagaggctgaggcaggaggatcgcttgagtccagaagtttgaggctgcagtgagccgtgttcccgccactacactccggcctcagtgacagagcaagaccctgtcttaaaaaaaaaaaaggaaagaaaaggggagatgggagacagaagagagacggagatggaaaagtggagaggcaggtggggggatcactgaacaggcttagagggcagggaaatggggagaggtgatgggtggggagagaaaaaggccgggtggagtgggagagagtgctgtgtgggactcccctttcagggtctcgctcatctctctcagtgatatccccactttcctgggagagggggacagtgtcctccccattcaagccaggagacacatggggggcagtgtgttttggggaatgactcatgttggaaccaaagtaaataaacacacctcaccccagctccaaattgggaagggaggaggctgggaactgaaaagccgcagttcctgaaggacgtggacgtcacctgggactcctgggtcctaatggagcaaaggagtgggggcttggacccctgggtctgagggaggaggggctggggccctggactcctgcgtctcatgaggccaggctgcacatccctcagtagggtaggggtcctgggattccacactgctgggctcctgagcagggaaggagctgggggtctgggtgcctgaatcgccaaagtttccccccaacaggcctgacggggttgggaggtgactcagtgagggaagcagcattagagctgggtggggttctcagcacgggtgtcaccccaaaaatgtaggaggcactagaaaactggggtgtcacctgcagagaaggtggtgtcatcaccccgccgggtatggggtgatggcaggtggatcaccctgctagctgggatcccaggtgtcccctccctccctccctccctccaacacattaggacccaagccttggtctcccagcaccacccagatggttgggtcttcctgtccccagaactcccggcagcgctcactgtcttgccggtgcacgtccgtcattggtcctagagcctggatgtctgggggacatctcctcacttgtgtcctaacatccctgtctcctcatctctgaatcttcgtctctcaccctgcatcttcacctttccagctgtgaatctgtctttctttcctcatctctgcaaatctctttccaaatctctgtctctccatctctgggtccctctccttccaggctctgtgtctctgtgcccttatcccggggtctctgtctcctatgtcaaaatctcttctgaatctcgcttcccatctctgttcatctccagacctgccctgtggaggcagctacagggccccatcccccctgctgtccagactaagggtgcaggtgactcaaggtcagtcatctccgaggaccccagggctcccagcatgacactctgagttgtcctcaagtttcctctctcactcctgacacagcctgggggccccaattagatctagcaattcatgcaggtgaggaaatagagactggggaagctgtgaggtggcctgcttgggggtgaggagggccgtgagcaggaggaggagctcctggggggctgaggagtgatggtggcccagtcaccaggcattggcctacatcctcctcaaacagggttgccacataaaatacaggctgtcctgtaaaatctgaaattcagataagcaacaaacaggttttttagcatgtttcatgcagtatttgggacatatttatactaaaaaagtatttgttatttatctaaaattcaaattaaattgggcttcctatagttttatttgctaaatctggaaccctaccatcaaagacagaggagttcaggactccagccccctcttttcccagaacctaggagtccaggccccagccttccctccttaggatctgcgagtccaggtcctaatcctcctcctcccccttagaaggaatggggcacccaaccccctcctcctttggaaatacaggagtccaggctcccagcccctttctccccagaacccaggcatccagaccaggtctcagtccagttgcccaatgtgggtcagtcatcactttgggtttcacaaggtgggttgtgccatctgtggccctggtggaaccggtccggcagagcggacaagtggcgtggtcccccttcccttcctcaacctgctgtttccttgaaggccagcccagcggggctgggagcagaacaggagggacttggggagctctgggtgtgcccctgtgtttgggtgtattgtgtctctgtgtgtggttgtgaccaattgtcatgacaacccccaactgtcatgatgtgtctctgtgctttttctgtggtctgcggtgtgatatgagagggtctcttctatttgtgtgtctgtattgccctcctgtgagtctacacactgtgcactgctgtttgggtgtgtttgcagttactgtgattctgtaattccggttggattaaggcagcaattatttattgaatggcagccttatgtgatggactctggagccagaaagcctgggttcaaattcgtgtttttttttttttttgagatggagtttcactcctgttgcccaggctggagtgcaatggtgtgatctcagctcaccgcaacctccacctcccaggttcaagcaattcacctgcctcagcctcccgagtagctgggattacaggcatgcaccaccatgcccggctaattttttgtatttttagtagagatggagtttctccattttggcagactggtctcgaactcccaacctcaggtgatcctcccacctcggcctcccagagtgctgggattataggcgtgagccaccgtgcccaccctcaaattctttttttattgagacaaagtctcactctgttccctaggctggagtgcaatgagtgggaggactcactgcagccttgacctccccgactcaagtgatcctcccacttgagcctcctgagtagctggggccacaggtgtgcaccaccatgccagctaatttctaaaatttttttgtagtgacggagtcttgctatgttgctcaggctggtctcaaactcctgggcccaagcaatccttctgcttcggcctcctaaagtgtcaggattaaaggcatgagccactatgcccagcctgggttcaatttctgactgctggctgggcacggtggctcacacctgtaatcccagcactttgggaggctgaggcaggcaggtcacttgagttcaggagttcaagaccagcctggtcaatatggtgaaaacccgtctccactaaaaacgcacacaaaaacccaggtgtggtggcatgtgcctgtagtcccagctatttgggaagttgaggcaggagaattgcttgaacccaggaggcggaggctgtagtgagccaagattgtgccactgcactctagcctgggtgacagagcgagactccatctcaaaaaaaaaaaaaaacaaaacccaccaaattctgaccacctgtcagtggctgtgaaaccttgggcaagtcactaaacttcttcagatatcaattttcccacctataagatgggttgttgcaaataaggttgtagagagcattaaataaaaagtgcggccaggcacagtggctcacgcctataatcccagcaccttgggaggctgaagtgggcggatcacctgaggtcaggagttcatgaccagcctggccaacatggtgaaaccccatctctactaaaaatacaaaaactagccgggcatggtggtgggtgcctgtagtcccagccacttgggaggctggggcaggataatcgcttgaacccgggaggcagaggttgcagtgagctgagatcgcaccactgcactccagcttgggtaacagagtgagaccccgcctcaaaaaaaaaaaaaagtgcttggaattgtgcctgtcacataggaaacattttttgttgctgctgctgatgacgatgatgtgttcttctggttgccggggatacagtagggaattaacccaggtctttgctcatggtcctcctggtaggagctggatgagtggcctctcagtgactggccatgtaactgcatcgctggggtgtctgttttgcatgtggaataggatatttcttgtgtgctgtgatcacgggcgattctgtggttgtgtgcctatatttgtgtttgtgcttgtaggtgattatattgctgcatgtgtgtgattctttgtgtgggtgcaaatgcaagatcaaatctaacacaaattgtgatggcacgtgtttggtgtgatcttgcatttctgattctgaggtgctgggagtgtgtctataattggaatcttgagaacccttctctcagctgtgaggccactcccttacataacatcccataggtgacccctgggagagatccttccaagatgagccttggtttctccctaatggggatagtgggcccagtggctcaaggagaaacaggagattgaaagggaaggtgggaggggaccagtgaggccagggagagggtaagagacgtgatggtgacacagaaaaacgatggctggattgggacagaggaagagctgcccagagacggggatctctgtccattcattccatgagcatttcctgagcccctgcaatgtgccaggacctctggtcggttcagggtctgggggaaagcagagagacccagagagatgacccccaccaggaaagctgttgctgccccaaggtggcccactgcctccacaatgggcctcagtgacagttctgagtgaccgagatgcagtgatggggagggacagagaaggccagatctgtccagatcaaagaacagaggccatgggggaaaggtcccttccaggcgaaggagaccgccatgaatcatgttcttatcacctcctaataggctcatgatgcaagtgcacctcctaatcactattttcgaccccaaccaggctcacgcccacagtcagaagggttggacaagcttagtatcgtggattcacgggagaaaatatctgggagaccccatccttggacctgctttccccaggacccaggagtccgggtccccagctctccagttccccagccccaggagtcccagctctcagcccctctccttttgtttgttgcctgcgttttcttttttctctctgggcctgtaactctttgtttatctccatctatgttttgtgtctctcttgtatctttacatctgtatctggattctccctcactaggcctcaattttctcacttgtaaactggggataatactactaataataatccaatctctcagagctgtggcgaggaagacatgagataattatgtaaaatgctcagcacagaaccaggccacagtaaactcagtacaagagagctctgttattattactgttttatttttgccatctcccctttggtatctctatttttctcttagtctcacgtgagtctccagtctcctctagctctgggttccttttgcagacagcacctgcctctgacttcccttttcgggatgaggaaagggcatatccaggccagagcttcccctgagcctcttccttctccctctccattacaagctccgcctcattacccagaacacttgcctgggggtaaggcctggctcccttcccataaatagcctcataaaatcctgaaccccaaacctgtcatccctgggcgggcgagtgactcaagatcccggagttcccgctcctagacaccaaaccttcaggtttccagccccctcctccctctgacccaggagtccgggcccctagtccctccttcctcgggtcccagacttctcctccttcagaaccaaggagtctgaactctcaaatccccaaccttcctcaagacccaaggatcgggtcagcaaacagcctaggtatgtggggccagaaactccattcacgaccattctgcgaccgtctacgcccagggctcccaccccgactcagtccctccggaggcgggtccgacacgcgaggcgcttctttggagtctggcggcgaaagctatccatgacgtcagtcactatcttccagccaatggacactcggccttctacctccctgggccactcaggaccctttgcctggtaggcggggcccacagcccaactcgggcagcgataggctttcggagacgccagtctctgccaggcccagtcagtcggccaatagacccggaacctgagggatcggaatcctggtccactccgcagaggcccgagcgggctcgcgagggaacgggttctccgagtctggccgggtaagccctttccagcacgcctagtattaggattctgcacatagctcgggtggaaaaccgtgaggcttagtgaggcttgaggcggaggggggaggagctcagtcccggcgaacccatcttgctttcttggagaaactgagaccgggatactggatctgttattcatccatccgttcctcccaccctaagcctgattctcgtctgctcctgccttcctgttccttcatccgttctgcccttcctgccctcaattctctcactcacggattccctcgtctagccactcactcacacactctcccacctattagttagacaaacatttcctgaggcttctggtgtgccaagcctcgtgctgggcgatgctggtgaccaagatgagtcaggcctgggccgtgccctcaaggagcccgggtcagatgggaggatggacgttgatgggcatgggtgtgcggagacggtgggagcccaggagagacttttttgagtttggcgtggtcgggaaagggtttccaggggaggggccattggagctggatcttggaggagcagaaggtgccaggcaaagtggagatgccaggcaaaatgggtgtggggagggtgtttcagcgtgaccaaagacagggaggcatgcaggagcagtactgcgtgcaggtgcctaagcggaaggccagtcaagtctgtatggccagcaggggaactgtaaggctggaggaggccgaagagatgagcagaggccaggctgaggagcttggactttgtcctgagggtgagggggtagtggagagccatggaagggttgagagtagtggaggacaaggtcatagttggtccagaactggaggaatgagactggaagccagtagcccaggaggtggctctggcagggattcaggtaggagagagtggagcctggatcagggaagaggccgaggggataagatagagattcaggaggcaaggcttggtgctgtggctcgtgtctgtaatcccagcactttggaaagttgaggcgggaagatcacttgagccaaggagttcaagaccagcctgggcaacatagtgacagcctcatctctacaaaaaattagccaggtgtggccaggcgcggtgactcactcctgtagtcccagcactttgggaggccgaggcgggtggatcacgaggtcaggagttcaagaccagcctggccaagatggtgaaaccctgtctttactaaaaatgcaaaaaattagacaggcttggtggtgggcacctgtaatcccagctactcgggaggctaaggcagaaaattgcttgaacccaggacggggaggttgcagtgagctgagatcgcgccactgcaccccagcctgggccacagagtgagactcaaaataaaaaaaaaaaaaagaaaaattagccaggtgtggtggtgcatgcctatggtccaagctactgaggaggctgaagcaggaggatcacttgagcccgggaagtcgaggctgcagtgagccaagatggtgccactgcactccaacctgcacaagagtgagaccttatctcaaaaaaaaaaaaaaaaaaaaagaaagaaagaaaaataaataaggagattcaggaggcagagagaacagaaagtggggattgatgggctatgggacaaggggttgtccagcatgagacccagagctctagtctggaggacagtggagccatctctgaggtggggacaggaaaagaggagcaggttgatgggtagtgactgttttgacagaggtgaccaaggggttctatgagttggacaaggagagtggtgactcaggccagtggatctggaccttcaggaagagttctgggctacagctccctgccccagcacaggccctgactcagaagtcacttgctgggtgaacgaggacctctgagctgaggatcccttgcttcgcaccccgtgaggaaacggctttcttgtttctgcatcttcagtctctcccactcctccagcattcaaacatgtccatcatctctaaacacatgtgccctgtatcaggctctcttgtggcgcccactggctcaatcccttaccttccactccctcttcaacccactatgtctggctgcctaacggccatgaccctgcagtggctctggacaaggtcactgaggtcacctgctcattgctgacacctgagggtaacatttcaatcctcatctgacctggtccactccctgaaactcccttcaccctacatcctccttcctgggcagcttcctccctctctggctgctccttagaacccgccagccttgccttccactgcccacccccgcccacccctttactaggggtgtgatcctcagggctgtctctgtcctggccctcttgttgcttgtcccacctgcccaggcttcctggaaaggttctagtcccttggttccacctagactgcatttttttttttttttgaggcagagtctcattctattgcccagactggagtgcagtggtgcagtctcggccgactgcaacttctgccttccaggttcaagcgattctcttgcctcagcctctcagttagttgggattacaggcgtgcaccaccacacctggctaatttttgtatttttagtagagacagtgtttcaccatgttggctgggctagtcttgaactcctgacctcaggtgatccacccgcctcagcctcccaaagtgctgggattacaggtgtgagccaccacacccagccccagactgcacttctgacccttgttgtctcctggattgtcttcctgagaccttccagctcaccatgtccagaatggccctccacaggtcccacctgtcacacacacacctgagcctcctcccattgaagagacagcttcactgtccacctgcttccatggccagacctgggtgtcatctctgtccccttgctgtcctgtaacctcatcagtaggtgctgtccttcccaccttttatggctctgggatgctacacctacactccctacccttacggctcctgccccagctcaggcatcctccttggcctgtaggactccagttttgcccttttctgtccatcccccagtgtcccagcaggatctttcagtgccctgagctgaccctggccctttcctgctcaaagtgctcctgtggctccccactgccctccagtttagtccaaatcgtactccaggctcttcaggccctgctcctgctgaccactccaggcccctcacgcccctccccactttgcacctgaccttctggtcaggtggaagctttttctagccaggtggcagctttgatcactgccagctggctctcacaacctggcatgttttttcttcctagcagacttttgttcatcctgtagtgtcaagctcagatcaccacctctgtgaagccctccctgactaccacaggtggaacccctggggactgtgacagcctgtgtctgttcttccaccctctctgaatccaggatcagaagccctttgaaggcatgtcttgggtataaatcatctcaactccaaactcagggcttacaaggggccagagagttggtccaagagttgattgtcacagctggacagagcttgcatttccagtttttgtttttttggaaacagggtcccactcttgcccaagttggagtgcagtggtgcgatcatagctcactgcaacctcgaactcctgggcttaagtgatcctcctgcctcaccctcctgagtaggtaggactgcaggagtgtgccaccacgcccggctaatttttaaatgtttttgtagagactggtctatgttgcccaggctggtctcaaacccctggactcaagctatcctcctgtcttgcctcccaaagtgctgggattacaggcgtgaacctccgtgcccggctgcatttacagtattttgagcgccagtttgtttctgatttcctgctaactttgctccagttctgtagggtgtttgggtcactggagcctttgagacccgagagattatttttaacttttatatccccctgatggatgctgagcctggtctccctgggaccagggtgagtccagctaaccgaaggtcttcaaggggaggagctgaggacccagcatctcctggcagtgtacctggatgaagtccgaggggaggtgggtccgggttaccaaggagtccactcccttctggtcccaaaaatccagtcccccatacccctcattccaggtttcttggttcccagccgcttgagtccgatgctgccccctggtgggcaaacaccccaccgtatttgagagaggccaaactaattaaatacttttatttacaacaaaccaaaccgacctgcaagggagggccagtccccgtccctgcggcggtcgccgcagcagcagcagcaaaaggcagcggtggcgtgcaggtccagccgtctcggtgaccggtgtgtgtgcgcgtccccctccccgtggcgagggtctcagctttcgggcccccgccccgcccccttgccacccccgacttaagtaaggcacagcccgcgtccccttccgcccggcccggaaggcattcatgacggaggccggcgcagatgggaacaacaggcttttagtgtcgccccccgcagcccccgtctacccccgcagcccccgtctccccgctcggcccggctccggcgggaggagtgaggacgaggcggatgcgctccacgcacagctctgcggcctggcgcgtctcgcggcacagcgccgctagggtcaggaagccgtgcggcaggtcctccaccacgcgcagcgtcaccggctggcccaggttgcgcagtcgccgcgcgagcatgaccgagtcgtccagcatggggtccagcgcgcacgcctacgggacagcggggagggacgtggagagagggtgggggacagacagaccggggtcgggtagagcgaggaggggtttgatgaacaaagggagcgggaaatacggatacagacggagtggacggaggcaggagacatggtgggtgaggagttggggagagaatggagggaatggggggagttgtgggaaggatgggagaatgactttaactgcgatccccggcctctctccagcctctccctccccaccccgccaaacccaccttttttttctcttgattctccaagcccaaggggctgccccactgatcctgtctcttggtactcaaaattgcaaagtaaaacggaggcagccctgactcttgtcctcctcccgttcgttcggggcattgttctcccctggggacacgcctgtccctttctccccactccggagctctttttcccaggtgtacccgtgcccggtccccctcctccccgggtgccctgctcttctctaaatgcacctgtaccggccccctctgtcgctcaccacgatgtgcacaggtggcaggctcttgagcatgctgtcgggtgccagcagcggcgacatgaaggggttcttgactatgggtgaggagtagaggggcatctgtgtggcaccctggctggagcgtcgggggtggaaaccctcggggaaggcggcacggacgcccaggcctctgtccatggggctcagctcatttttggcctcagcctcttcccctgcatcctcaggtggtaataagaagttgacatcggagggtgtggaggggctaagtgtctcagctgacagcgacatctcgggggtgtccgacgacgtctcggagtttcccctcaggctcaagtccctcagggtcaggttcttgagggaatccgtgcccagtgggccctggggctgggccagtgctgcttcagacacactgcggcgcatcggctctgagagagggagagcagataggcctggctccgttagtttggttgtgtgtgtggctggcagggaatgccatgggaagggcagtcgcctgtggagcgctgtgaaaggctgtgtttccccagactcttgcctaggggatgggtggagttccagatgccccaggtggtcatggtgggggtcttggcagtggggcagtgtgttctagtgaaggatgtgtgtgtgtgtgtgtgtgtgtgtgtgtgtgtgtgtgtgtgtgtgtgtgtgactgggaagattaggtgcagtttacctctaggaacctattttttcttctagatcaaggaaatgaaaatagtccttggttcataggtggcaggactcagtgggataagatgtgggattaggtaccgctacccactggggatcataatatatcgttttttgtttttttttttttgagacaaagtctcgctctgtcacccaggctggagtgcagtggcaagaacatggctcactgcaacctccacctcccaggttcaagtgattctcgtgcctcagcttcctgagtagctgggactataggcatgtgccaccatgcccggctaatttttgtgttttttttttagcagagatggggtttcgccatgttggccaggctgttctcgaattcctggcctcaagtgatccgctcgcctcggcctcccatagtgctgggattacacttaccacaaggtgtaaatggatcaaaatgatttgaatagtaagcaggcccagtggcttgaagggaggctctgttcacagggagctaacaagtctccagggtgtatcacatttctaggggtctggcacctgtagccacatggatctgcttccccacatttcctttgtgttcttcagttttatccgttcacgtgaccaggcaagcaagtgcccaaacgatgctaaagatacacttccagcccacctggcgtgcccagcttggcctcagctctgttcattttatcagacccacactgcctaccatgagggccaagatgctacagttttagttttttactttttttttttttttttgagatggagtcttgctctgttgcccaggctggagtgcagtggtgcgatctcggctcactgtaacctctgcctcccgggttcaagcaattctcccgccacagcctcctgagtagctgggattacaggcatgccaccatgtccagctactttttgtattttttttttttttgagacagtctcactctgttacccaggcttgagtgcagtggcgtgatctcggctcactgcaacctcgtctcttgggttcaagtgattctcctgcctcagcctcctgagtagctgggattacagatgcatgccaccatgcccggctaatttttgtatttttagtagggatggggtttcaccatgttggtcaggctggtctcaaactcctgacctcgtgatctgcccgcctcggcctcccaaagtgctgggattacaggtatgagccattgcgcctggcccatttttgtatttttaatagagatggggtttcactatgttggccaagctggtcttgaactcctgacctcaagtgatccgcctgccttggcttcccaaagtgttgggattatgggcgtaagccaccacacccagccttacttgtctttataaatctacgaaggtgaggtgcaaaacaatgtgagaataactacttaagtactttgtggcccagagggtcactggaacagaatggacacaccaggggtgctggcatcttctaatagcacctactgggtgccatatattgtactggccaaatggttggaggcagacctcaccacagcccagtaagcgtactctttttttaaatttttttttttgagacaaggtatcgctgtgtcacccaggctggagtacagaggctcagtcttggctcactgcaacctctgctacccaggttcaagcggttctcatgcttcagcctctctggtagctgggactacaggtgtactccaccataccctgctaatttatttttttgtagagaaggggttttgccatattggccaggctggtctcgaactcctgacctcaagtgatctgcccaccttggcctcccaaagtgctgggattacaggtgtgcaccaccacacctggctaatatttttgtacttttactagagacagggtttcgtcatgttgaccaggctgatcttgaacccctgacctcaagtgatctgcccacctcagcctcccaaagtgctgggattgcaggtctgaaccaccatgcccagcatcttccctgggacttttgctgtgctaggctgtccctcctgcccaccctggctgggcatgtgacgggagtgaatcactcacctgctatgggctccgacatcttctgggacttgcgcccacttaactccaggaaggagttgagccatgaggaggcacccaggcggaagtctcggaggagcagggctgtgtcccgccgcaccagccccatcatgccgagggctttctggtctgagttggagtggtcctccgtctttgcacctgcagaatatatgtgggtagctgagttgttttcccctttctgggcccagttttaacgcccagaacttcaggcatctgtggtcccagggacccgagaatatccaatcgcttcaaaagggataaggaggctgggcgcagtggctcacgcctgtagtcccagtactttgggaggccaaggcgagaggatggcttgagcccaggagttcaagaccagcctgggcaacatagcgaaaaacacaaaaattagctgggcgtggtagtggtggtgcacgcctgtagttccagctacttgggaagctgaggcaggatgattgcttcagcctgggaggtcaaggctgcagtgaggtgtgtttgagccactgcactcagcctgagcgacatgacaccttgtgtctgtctgtctctctctctctctcacacacacacacacacacacacacacacacacacacacacacgaaaaaaaagggacaaggagtcttagattcctctgcctggcctctccttcctcagtcacaggagtcctggtccccagcccgtccctgcaggagtcagacatccatgcagtcctgtttccctgctgagggtgtgggcctcaccagcataggcgctgacacacttggagagcacactgaggggcagcaaggggtccatgaggctcagcaggcgggagggagaggcggcaggctgcagcattgtggccgggtaggctgccatgatgccatctggcacccgcaccccgtaggctgctgcccgaagagccacggtgaagcagaggttcccgcctgcactgtcccccgcaaggcagattcgttcccctgttgagcctggtttgggagaggggtggttggtgacaacctggcaggggcagaggcctggggaggagggcagggaggaactcaagctgggagaactgggctctccaaggtggggtgtggggcactccaaggcctagcagactgcagttttagagactggcagactgaggcacagatttgggctcatgtggtagacagagggtcaggatgactcaggacctggagaggcccagggaagcactgggaaagtctgtcggggctggaggttgggagcagggagggcaggtggtgggaaaggggagctgagctcaggcctgttgcaggaggggggcctcagagggcgggaatggaaggtcagggttcagggtcagtacagaggggctgggctgcaagctctgtgccctggggcatggccacactctgctctgtgcctcagtgtcctcccaagatgttgatcttcgaagagggaggtcagagaagctggactgtgggccaggaggctggtaggacaggagagcagggcctggagctatcagagggggacgacagaggcccagggagacaggacggtgggtgggaagtggaggtggaggagatggagagtctgggtgccacagttggggacagaggataaagtggctgaggtggaagattgggcaggacctgggtgagcaggagctgggaggtgtggggggagagaaaggtagagggtgtgaggctgaggctggaggagcttaaagcaagctgggtgggatgggagcaggcgcaggtggctgtgggggcctgaggctcaccaaggagggcgcagtgcttgatggcccagcagtaggcgaagaagcactcctccagcgcacgggggaagggggcctcaggggccagggagtagtcgatggagatgatgggggcgcccagctcctgggcccagctcttgaggtagggctcgtgggatctggaggtctgggccacaaagccaccgccgtggaagtgcactatcagggaccgcgagcggggtgcctgctgggggcgcggccacagctccaggctccgttggccgttggactttatcaggctgctgagctcctcactgtcctgggggtgaggagggagacggtgtgtgaggttggggagagctggccagggctgcacccctccatggggatgccaaggtgggggctgcccacgctcctcggctctgtccctgtccctggctgaggctggaaccctacctgtccttcacgcaggtcataggagatgagcctgacgaggacgggcccagggcctgtgtgggccagtgggggtgagatggtgaccgtgagcgtggggtcggcagtcagtggcatctcaaaggcttcgggtggcaggctgagcaggcggcttaccctcacggtggccgatgccatgttggccagagactggagggaggggacagaaggggtgctagggaaggtctgcctgcaggggtgcccttcacctctccctctgatccccagtctttccccttgtgtgccatccctgggcctggagccccacagagacctactgtggcctcagatgagtctctgggcctcagtgtccccatctgcaacaggccctcaccgatagcacttccatctcggtgatgttccagaaggctttccagaagtgcacgtccaggttctgtgtgatccgctcaaactcagccccacgcagctcggggtcgatggcaaagcggccgctggtgaagagagagctggcggccacacctaggggtcagaaggggtgtcagggagccccagtgggtcaggctgcttgggcaggagtggggaggagggccaagagagtaggctgcgagtagaacctggctgggactcactgaggcctgtctcgttgcgtttgtagtgctccccgaaggacaccagcccaatggagatggtctgcaggaatggccggatggcaggcgtgaactgtggagagacgcggctgcgtcacccaccgctcaagagagggatggggacagggcaggagcgaggcacagggatgtgcggggaagacacattcattcagtaaacgtttcatgagctcctactgtgtgctgggcatagctctcggctggttcacggacctgatgttctcaaagggaaaacaaatgatcagcagataagcaaagccacgcgcagtatcatgacaaggaatgacgaatggtttggaaaaaaaaaaaggcagtaggtggagagggcaccagtgatgactaggggtcaggctacttagcgggtctcggaggagagatctgactgaagcgaggggagggtgttccctgcacagggaacagagagcatgaaggcttaaaggtgagctcataggaggctgaggcaggagaatcgcttgaacccaggaggcagaggttgcagtgagtggagatcacaccactgcactccagcctgggcgacagagcgagactctgtctctaaaaaaaaaaaaaggtgagctcatgcttggtgcttgacctgggtagcgacagtcagggggccagtgtggctggagcagagtgagcagtggggagaggggcaggtggtgacattggagaggcaaagggggctcatatagggcctgggcagaggaatttggatttcattcccagtgcggggtggtgccactggtaggctgtgaggtggggagtaggatggtgcagggacttcctgaaagtcagagagaggatggatggggagaggaggcagctggaagacaggaacagggagatggccagagacagccccccaggcacagggacctgaggcagaaagacagtcagagagggagactgaggcctagacataggaccagccagccaccacgggggcagggagagacagcgtctgacagagcagacaggcagttaaggaaagacagtggggtccaggtgcagtggctcatgcctgtaaacccagtactttgggaggccaaggtgggtggatcacttgaggtcaggagtttgagaccagcctggccaacatggtgaaaccccatctctactaaacaaaatacaaaaaaaaaaaaaaaaaaaaatacaatggggacacaggattagaggaaatggagccataggaggccaaggcaagggattggcgggttcttctgttcactctgtactggccaagttcctactgcatgctagacactgggctggagcagtgaccaagacaggggaggcctctgccctcccggggacggacattttaaaggggagactgccctgcaccaaggcagagctgggccctgcccctggctgtgcgcccagtaggccagagggcacctgatgcctggctattgtggctgggatgctggtttgggcagccccgggatctctttctcatgactctagggtcacggctgggacacagggaggagctggctggcccagctgggctgatcaatacttgtgggttcagccctggtgaggggaggtttccaggaatgcctgggctgggttgctgaggataggctagcctgaagggaagcctggagatgtggggtgggagggggaggctgaggtgcggggaggcccagagagggccagaatgactatagggtcacatggctccagatccctccctgaggggtctcaaactcaagtgacttcaggggccagacaggtaacaaagagtgaatacatctcttgcatgtaggacaatagagagtagtggatatcctggtgaaaaaagctctgcaagttgcatttcttaccacctagcagatatgacctagggaccatgagtttgagacccctggtgcagctctgtctgagctccagccaacttctcctttctgtacctgctgtttgctgagtccgataatgctgaccactggttactttaccatactataggccaggccaggggccaccaggtgccttcattgtgggcccagaggggcacggggcagggggctcacctggaagcccaggcagcggccatagaagcatcccttatgcagcgtgacatactcccggaggaagtcggcggtgagcccctcgtcgccctcaaagaagagtacccccggccgattggtaaccagcaggcgctgggcgtagtagaccagagcgcggagctgggtgagggcagccaggtaggcctccagctcggccaggttgtggctggtgcggaagaagatgctgcggcggttggaggccacatagcgggatttgtgcaggaggtgcgccaggcagcagcgggctgtgtgcactaggctgcggtacccgttggccggtgtctctgggtccaggtcaaagaggtgcgccacacccagcaggcggcccagggccggctccagccccagcgcctgctcccgtacaccggcaaaaacgcctgacagccgctgggccgtttccccaggaccctggctcgagaagaaggctatgttgtcctccgccagagtcaccagcgactgtgtcattgtgcgcaggtccatgttgtggatgagccttgaggctgtgggcaggtggggaggcctgttaggtggggctggatcaagccttgcttagctggggcccaggagtctgggccatagcttacccactcctccttcaaacctcagtgctgtcttctttcagttccaggggcccaggaccccaggttcctcctcccttagacataagaggtcaccctcttgtctctgggaatcagaagtttggggccccagttcccagtgcctttgtccctcctcgggagccaggagtttgggccctcagctccctcctccctcagacccaggagtccaagccccaagcccttcctcttcaggacccaggagcccctgctatcacctctttgggactcagaaacttgctgccctggcctcctgaatccggacattccctgagcccacacgactctgcttccctaactcattcacctctcctgtgatccaggaggctgccggtccttctttcttccttccaggaacccaagagtctagtcacctgtctccatgaattctcctggggcccaagactccttctcctagattccaagaagtctaaacctccagttggtccccattctcaggacccaggagtccgggtcccccatcccatctttccttcttaggccccaagtgctacccataggcccttcccctccaacaacatttgggagagttcagccccagccctcccattcccatctctcgggaccctggtccccaagcgcagctctccctgaactcaggagttcacaattctagacttcactgaagagtcattcctcatccttcaagtctggctgtggaaccccctccaaatcccagttccctccctgtttctctgtgagatccccaaaactcagtcttgcttctcccccagtggggtcccctggccttcaggcttgtccactggtcctgggttgcatggccggccctgctcccctgcctggaacagcgatactcatcactggtgtcgaccttgagcatatccgtgcaggtcccgtgctgagagctttctgtgtgtttgctgctttagcgtgctaaccctctgggacccacaccacctaggttcaaatctctattattgccagcatccccattttacaggagaggaaactgaggctcaggttttaagtgaggaggttaaagttgcactgcaagtggcagagcttttgtaaacccagctctctgggtccacagccacacttatgtggggctccccgctaggactctggaagccacatctcaaaacttgccctggactacgtctgatctccacactttccagtccccagtgatctttcctctgatatcctttcccagccattcaggctgccctgtttcttggatgccctgtcacccaggtcctgaacaagctgcccttggtggaatgctaccatctgctccagtgacttccctcccaaagcccagcaccttgcctgttcccctagaagaaggtatttcctttcccttctaggtcctggggcctggcagcggccattcccgtctctcagctggctggacactcacccctcctaggcatcttccgagcttccctgggctgggactgctggtctgtggcttgtgccagtagcagcctggggcaataaacccgggggcggggctggcctgcccagggtgtagccgcacaagccacctcccacccagaaagatcagtgaggaccacgtgctgtaaacagagtagagggctcagctccctgctctgccccccacctgctcccagactcagctcaactggtagtcctgttacaggctcctctgccttagaacccaggagtccacacccacagcccctcctccctcagacccaggagtccaggcccccagccccttcatcctttaggacccaggagtcctagccccagtcctgaacaaaccgtcccctctcacccagccaggctgccctctctgtccccagagaggactcagggagccaaaggcccagtgatctcagctcccgcctcctagtctggccctggcacagccagccccagctgttggggggagagaggaggtagccagccctgcctgtccctcctggaaggacaaaagccgattaagggcagtgccaggctcagctaggggcctgagctgcctgtcggtcctactgggtggtgtgaccacactgggtaacctggacctgccacttacccctctcagcccaccctgctgtgactggcatccccacctcacacagggaaacagaggctcagagagagagattcctcacccatgtcattcacccgtgtcattccacagattccttgtctggcctcagcttgtcacttccaagaggtactccccagttgcttctccccagctaagatatgcacgcccccgttattttctgccatgatatttagttctgttccatcctgccatttgacactttataatttgtttacgtgtttgttcatctcccccaggacaggactaggttttatggagccatgaaacttataaggtaccggggtgtggccctttaggaagaagaaatacagaattacaaatacaagattagggccttgggccaggcgtggtggctcacgcctgtaatcccagcattttgggaggccgaggcgggcggatcatgaggtcagcagatcaagaccatcctggctaacacggtgaaaccccgtctctactaaaaatacaaaaaaattagccgggcatggtggtgggcacctgtagtcccagctactcgggaggcggaggcaggagaatggtgtgaacctgggacgcggagcttgcactgagccaagatcgtgccactgcactccagcctgggtgacagagcgagactctgtcttaaaacaaaacaaaaaagattagggccttgaaaggggcctgtgtgactgaggggctctgaggcctcagggtcatttgcttggctggaagtgaatcttctgtcccggactgtcatcccccaggtggccctggggcctatcatgggacctggcacatagcaggtgctcagtggatatatgaagcaggaaggaaggcatgaagaagcagagcgagggcagaggggctagttagctcaggagaggacggcccctccccagggctggcagacagatggatagacagaggcctcaggaggcagtgttaggcttgcagctgtgaaaatgggacgatgtgggctaggcacagtggctcatgcctataatgccagcacgttgggaggccgacgtgggtgggccacgaggtcaggagatcgagaccatcctggccaacatgctgaaaccccgtctctactaaaaatacaaaaattagcggtatggtggtggatgcctgtagtccccactattgggaggctgagacaggagaatcacttgaacccaggaggcagaggttgcagtgagctgagatcacgccactgtactccagcctggcgataaagcgagactctgtcagaaaagaaaggaaagaaagaaaggaaaggaaggaaagaaagaaaggaaagaagaaaagaaaaggaaagaaagatggcccaagcccttgctggcgaccctggatgagtctgttttcctcatctggaaactgcacttggctgttctgctggctcagggtgggagacataatttataagtggggccatggccggcatgttctgcatgtggtttgctttgtgggctcacttggccttcctgagatggtgtattgggtgatttttctctgcggcacttgtcaccatctagcatactatacagtttactacaggaataccttgcttcactgtgcctcgcacatactgcattttttacaaattgaaggtttgtggcaaccctgcgtcaaaccagtctgttggcaccatttttctgacagcagttgctcactttgtgtctctgtgtcacattctggtaattttcacagtgtttcacactttttcattattattatatttgttatgatgatctgtgatcaatgatctctggtgttactattgtgagtgggggcaccaccaaccatgtccacgtaagagggcgaactttaccgattaatgctgtgtgtgttctgactgctccactgaccagccatttcccccatctctcttctcgagcctccatattccctaagacatacaatattgaggccgggcacggtggctaatgcctgtaatcccagcactttgggaggctgaggcaggtggatcacttgaggtcaggaggttgagaccagcctggccaacatgctgaaaccccatctctactaaaaatacaaaaattagctgggcatggtggtgtgtgcctgtaatcccagctactcgggaggctgaggcaggagaatcgcttgaacccgggaggtggaggttgtagtgagccaagatcacaccattgtactccagcctggaaaatagagcgagagtctgtctcaaataaatgaaatgagatgaaaaatagaataaaataaaatagaaatcaggccaattaacaaccctacaatgacctcaaagtgttcaagtgaaagaagagtcttatgtctctcattttaaatcaaaagccagaagtgattaagcttagtgaggaaggcatgtccagtgctgaaacgggctaaaaactaggcctcttctgccagttagctaagttgtgaatgcaaaggaaaaattcatgaaagtaattaaaagtgctactccagtgaacacatgaatgataagaaagtgaaccagtcttagctgggcatggtggctcatgcctgtaatcccagcactttgggaggccgaggcgggcggatcacgaagtcaggagatcgggaccatcctggctaacacggtgaaaccccagctctactaaaaatacaaaaaatcagccgggcgtggtggtgggtgcctgtagtcccagctactagggaggctgaggcaggagaatggcgtgaacctgggaagcggagcttgtagtgagccgagatcgcgccactgcactccagcctgggtgacagagtgagactccgtctggaaaaaaaaaaaaaaagtgaactaggcttattgtggatatggagaaagtctgaacggtctggatagaaggtcaaaccagccacatttccttaagccaaagcctaatcccaagcgaagccctatccctcttcaattctttgaagggtgagagaggtgaggaagctgcagaaaaaaggttggaagctagcagaggtggattcatgagatttaaggaaagaaggcatctctgtaacataaaagtgcagggtgacggccgggcatcgtggctcacgattgtaatcccagcactttgggaggctgaggcaggtggatcacctgaggtcgggagtttgaaaccagcctgaccaacatggagaaaccccatctcaacttaaaatacaaaaaagaagccgggcgtggtggcgcatgcctgtaatcccagctacttgggaggctgaggcaggagaatcacttgaacctgggaggcggtggttgcagtgagccgagatcgtgccattgcactccagcctgagcaacaagagtgaaactttgtctcaaaaaaaaaagtgcaaggtgatgtagcaagtgctgctggaggagccgcagcaagttatgcagaagatctagctaagatcattgatgaagacggctacattaagcaacatattttcagtgtagataaaaccaccaggtattggaagaagatgccatccaggactttcctagctggaggggaggtcagtgcctgggcgccaaagcttcaaggccaggctgacccccttgttaggggctaatgcagctggtgactcagttgaagccggtgttcatttatcattccagaaattctagggccctcaggattacgccaaatgtactctgcctatgctcttaaatggaacaaagcctggatgacagcacgtctgtttacagcatggtttactgaatatttcaagcccactgttgagacggactgcacagaaaacaacaaaatatttctcaatgacaatgcatgtggttaccaaagggccctggtggagtagattaatgtgttttcatgcccgctaacacatgatctgttctgcagcccaccagccaaggagtaatttcgacttttaagtcttgttatttgttattattattatatttttttgagacggagtctcgctctgtcgcccaggttggagtgcagtggcgcaatctcagctcactgcaagctccgcctcccgggttcacgccattctcctgcctcagcctcctgagtagctgggacgacaggcgcccgccaccacacctggctaattttttgtatttttagtagagacggggtttcaccatgttagctaggatggtctcgatctcctgacctcgtgattcgcctgcctcggcctcccaaaatgctgggattacaggcgtgagccactgcgcccggccaatttcaacttttaagtcttattatttgttattcttatttttaaaatttttagttttagagatggattcttgctgtgtcacctgggctggagtgtagtggcacgatcatacctcactgcagccttgaacttctgggctcaagtgatcctcctacttcagcctcctgagtagtggggactacagatgggcaccactatgcctggttcatttttttttttccaggtttttagagacagagtcttgctatattgcctaggctggttttgaattccaggcctcaagagatcctcctgccttggcctcttgagtagctgggagagtcactgcatctggctaattttttgtgttttttaagagacagggctgtgttgcctagcctggtcttgaacactggacctcaagtgatcatcctgcctcagcctcttgaatagctgggattacaggcatgtgccaccatgcccagctctaagtcttattaaataataaaaaatagaaatacatttagaaatacattttgtaggctgggtgcagtggctcatacttataatcgcagcactttgggaggccaaggcaggaagatagcttgaggccagtttgagatcaacctgggtaacatagtgagaccctccccctctacaaaaaataaataaaaaaataaaaaaacagaaatacatttgatagcaggaacaatggcaacaaaggatttagactatgacatagacttggctgatagagcaccagcaggctttgacaggactgacccccatttttttttttttttgagacaagtttcgctcttgttgcccaggctggagtgcaatggtgcgatctcagctcaccgcaacctccgcctcccaggttcaagtgattctcctacctcagcctcctgagtagctgggactacaggtgcctgccaccgcgcctggttaattttagtatttttagtagagacggggttttaccatgttggccaggctggcctcaaactcctgaccttgggtgatttgcccacctcggcctcccaaagtgctgggattataggtgtgagccaccgtgcctggcctgaccccaattttgaaagttctactgtggaccaaatgctatcaaacagcatcacatgttacagagaacagttttgtgagtgaatcgaagcagaaaagttcattgttaccttattttaagaaactgccacagccactttctacaaccaccaccctcgtgagtcagcagccaccaccactggggcaagaccctccaccagcaaaaagatgaggatttgctgaaggctcagatgatcattagcatagtatggggccaggcgtggtagctcatgcttgtaatcctggcactttgggaggtcaaagcaggaggctcacttgaggctaggagttcgagactagcctgggcaacatagtgagattccgtctctacagaaaaaaaaaaattaaaatatgtacatggtatttttagacatatgctgttgtacactttaatagactacaggatagtgtaaacataacttttctatgcactgggaaaccaacaaatttgtgtgactcactttatcaagtggtctggaattgaaccccaaatatctctgagacatgcctgaatttatattgtttgctctctgattccctcactagattgtaaactccctgagggcagggacttttgccttttttattcagcctttggacagtgcctggtgcactgccgccccttggtaaagtggtagcatccatgccggtagggatcttttaagatgaggagtgggggccgggcgccgtggctcacacctgtaatcccaccactttgggaggctgaggccggtggatcacctgagatcgggagttcgagaccagcctggccaacatggagaaaccctgtctctactaaaaatacaaaattagccgggcatggtggcgcgtgcctgtagtcccagctactcgggaggctgaggcaggagaatcgcttgaacctgggaggcagaggttgcggtgagccaagatcacaccattgcactccagcctcggcaacaagacagaaactctgtctcaaaaaaattaaaataaaataaataaaaagatgaggagaggggacatttccaacaaaacaagtgactgcacaaaggagtggggaaggggctggacccaggccctagggactccagagctctgccctttgtcctgttccaggcggctccccgaggactgggctgggtggagctggcaggaagggatgctgaggttgccagcaactcgccaggaatccctggcagagggcactggggcaggggtaggcccactggggccgtgggtaaggactaggggagaggtagggcagaggggatttggctttgggtggtgtcccactgactgggcactggacctttctttgccctgaagagtttctggacagctgaatccgactcctggggactgagcaggggtaaggagggcggtggggaaggaagtggggtgggggtggatgggggatggaggaagggccaggtgtggggcctgggaggaagcaaaggcttctgaagccaggaagcctggaatcagatgcaggtggggacaatgagtggctggatccccgagagtgtgtgcataaaagagcaaacgttgcaccaacagcctctgcgtgcctggtctctttctctgtgcgtgtgtgtgtttaatttaaaaatagggatcgagtctagctgtgttgcctagactggtctcgaactcctgtgctcaagcaatcctcctgccttggtctcccaaagtgctgggatttcttttcttttttttttttttttcattctcaaaggaggtgatgagatttctttatgtgttttatgtgaagtgactcatgtcgcctgccccacaacctatgagggagagaccattatcatcccttttggcagatgacaaaattgaggcacagaaaggtgacataacccccggggtcacacggccagcagggggcagctccagggcagagctgctgatctctgctgtgtttctgtgtgctgctccctctgtctgtgcttcaaagtatatgctttctggtcgggtgtgagtgtgtctggggttcacgtgtacatatgtacctctgcaggtatgtgtcatggctggcgtgtgtcctggcctgtgtccgtcggcactggtacatttgaaggtatgaatgtttgtatgcctgtgaatgtatctgtgtctctgtttctcttggcctgtgagcttgtgtgggcgtgtttgtttatgtatgaatggatatacatgcttgtgcgtgtcttggtctctgtgtgtgtgttgagaacaaacctctccccatttgctcaagctggaacccaggatgtcatcctggccacctccccaccccccaactcccatgcaatccatcccctagtcctgcccactatgcctactaaaggcctctggaacctggcccttctccccacctccactgcctcctccctggtccaggcggtagcatcattacctgggtgactatgacagatctttatatatttctgattttgttctctttgatttgttgtccacatagcagccacaggatctttttagcacacaaatctgttcacacacttccaacccttcaacaccccctcccttgctttcaggataaagcccccaatcctgcacatggcctcccaagccaggtaccatcctcctctctctctctctttttgagacaaagtctcattgttgcccaggctggagtagagtggtgcgatcacagctcactgcagcctcaacctcctgggctcaattgatcctcccacctcagcctcccaagtagctgggactacaggtacaccccaccatgcccggctaatgtttgtgtttttggtagagacggggtctcgctatgttgcccacgctggcctcaaactcctggactcaaggggtcctcccaccttggcctcccaaagtgccaggattacaggtgtgagccgctgtacccagctaccatcctcctctcttaaactgcctgccctgtttcctcttcctcttcctcctggccctggctgagctccctctgcactgtaactcagtgtttcctcaagcctcgggtctttctccatactgtcctctctgttcccctgcctgccccctgcacagcacttaacgcctgtccatcttgggtccaatattgcctccttgggaagcctctcaattctatcttcccagggtgtttttctctgttgtatttatcacagtttacaatcatagtcttatctgagtaatatctgtgtccccagctcaactgtgaatctgtcagcccaggcctggcacagctcagtgttcagtgaatgtctgctgaatgaatctgtgtgactggaacctcttgggcccagaatcaagtttgggcccacagcagttgtgcgtccacaaactccctgccccgaggaggctgaggcagccatctctttgccctcactggccaagtaaggaagcccaggcggccttggtccctcagagccccagtgtcgtcatctgggaaatggggtgatcctaaggacactagcctcatccagttactggcaagatgaaactgatgacgaggattgctccagccagcccagatgcccttgaggcaggagtgaggtctgattaatttatctaaagcctggcacgagggcggggcttcaggaaatgacaggcaaatcttggagtttgcaggaatgagcctttgtgaatggctcgttttgcagggagccctgcccaactggattctgactcctcatgacaaccctaagggaagcgtgattattatgatctctgttacagttcacacattccttcacttattaatccaataaatatttgagtgcctatttgcctggcataccaggctctagaaatacagggtaaacaaggcagatacagccctgcttttaggatgttcaccgtccggtggggactaacagtaacaataaccttcacttctcctgagggtttgctgcgtgcctgtgccaaacgctctacattcattctaacctcacaaaaggaggtactcctatcatcatacccattttagagctcagaaagctgaggcagggaaagagggagtctcctgcccagaacatcacagctcccagcctgaggaaccggatctccgacgcccacgtttcttaactacagtctgtactgcctctgggtatgctatactggtgtgaggctcagtgtcttgctgtgacagcgagtgcccttgggctccagtccgtctgccctctgagcctgtctgagcctgcgtgtgtctgaagccaactccaggtctattctgggctaatgatgtgttctacggcaggggaagcaatgagtttggggtccctggggctgaggggtggtgttagtttccttcctgcatgggaacctcccacgggtccccatgctgattgataaatgcttgtaactgaggacctgcccctgcctgaggcttgcagcatttctgttggtctgtcagcctttgttccgccttttgagacctgaaaataatgtgacaccctagagaaatgaggccttcccttttgctgaggcaggtgtggaggtctgaagccaagccagggcccgttgtcctggaaagggtaggggtcagggctaggccccagtggagccggctgaagcgggttgactgacaatgaatggatggatggatggactgacttgccgggtgggaggccgggactgcgatgaactttactggccccgctgcactctccactatgggcaccccttcctcctacctctccttgactcaccgctagacttcctctttgagtaacacctgctaacctccttcccccttatcctctcaagagcgctggagccctgaacatcggcgcttgaagcattccccaggtgggaaacactgagggcatccgttgcccttggtcacacagcgaatacggaatccgagcgggaaccctggtccacgaagctcgcattccggactctgctcccaagccgatccgggcgtcagctagtccctgtgccagggtgggcctctcggctgtcacatcacccccttctcacaatggatcatcccgttgtccccgcaagcggcaatgggccagtccgcggacccccccaactccctgtggcagtgggccagtccacgctgtccccactgccccgtaggatgtacgaggttccttccgggctgctgccggtctccgcgcgctcacctttggccttgtcttttcgccaccgccggcgaccgtggctccttgagccctctttggcattcttcgaggccggggccatagcggcctcggcgggctccgttcccccggccaactccatcaattccccgcggtcctcccgcgggggccaattccagccgcgaggccctgcccggagggccaatcctcgctacacactactgtcgggcccccctattacccaatcccgagcttgctcttctctgggtccagctccctaaccaattctggtctccctccgctgccgtgctccgcccccaaccgccagaatttaagatctggctccgccccctaccgcgcattaaagggctcgcggccaacaaaaaggcaaccccgggggtggcgaaaagcgtccttcgggcaggactagtgcggagccccgcggggagcaccccagcagggaagtcccgatcttcccacgtgctgggaagcctcccatgtgctggctcagtctcgccatcccactcaccttcccagggagggatgccctagcacgcggcccggcccgccttttgaagggggaaagtggggcgcctctgagcctctgcctggggtgggggcgggccaggtcctctgccaactcaaagacgaggcggggcgccagcgctggaggcgtggctgtgcctgagagccgttggaggagggagccccgctttccctctcctgtctcctagttctcctattgcgcttttcctgggggatctttctccctctgtctccgccccctaatccatgctcccgataatgagggtgggggatggtggtaggagaacgctcggcgcctgcgcactagcttcaggccgcgggccggcccaagagcggaggtagagggaacgacgcatgcttgagaaatggcgggaaacagaggaggctcgaggcttgctcacacgcacacagccaactgcttctggaccgccttgctcacacgcacacagccaactgcttctggaccgcctgaaaggcaacctcgcccgccgcggtggtgtggggcgggcatcccttgagactgtgctctggaggcctggagaaacagctttctatcctcagcactggggagagcaggcctcaatccctgcctttgcctgccgcccctcttccttccctctcaaagcatacccagcagccccggcgctgagaaacgcgttactctcttatcagctgtgggagagacaagacagactggcctctgggcggaggggccgccattgcctgccctctggaccagggcctcacagataccctcagcttcaggattagggctgcgttggtttttccccccacatcaggggacttcaacaagtaacctccagttccatagataaaacttgtattccccccttctccatggcaggggttttgagcctagagaaggaagatcggagcttcctggggctcctgtgaagcaggcagggggcagcactgggccccgggaagaggcggagaaggcgagggagtgcctgcggtgagcccagagccttgggcccgttatcctctgatgctgctcccccaactttcctgccgtcagtccctgaccttgcctgagaccttggcggctcccgcacctctctcccggctcctccttgctgagaacacaacccgcaaggcccttccgcctggctggactgagtcccctatggaggcagcctggcagggagcaggtatcttcctggcagaagaggacagacctggtaaactgagagactgttgatgccccaatgttctgcctagcctgcctggaaactccagaagggtaaggtaccgtctttgtattgtattgctgggacttacgcccgtgtctaccccagagctggtgctcagtcagtttctgtggatggatgaatgaacactggcaagagggccgctttcctggtctcctggtccctagctcagagtgccttcccactctgggatttgattttccccaaatcctctatagggaggcagcctggtccaggggagaaagaccccggcttcaaatcctgactttgccacttcctaactgcatggccctgtgcaagaacccttacttctttattttctacctgatgtcctcatttctaaaatgaggatgttggccaggtgctcggtggctcatgcctgtaatctcagcactttgggaagctgaggtgggaggcttgcttggggccaggagttcgagaccagcctgggcaacatagcgaggccacgtctctacggaaaatgtaaaaattagcggggcatggtggtgcacttgtagtcccacctactccggaggctgaggtatgaggatcgcttgagcccaggagtttgaggctgcagtgagccatgatcataccagtgcaccccagcctgggcgacagagtgagactttgtttttttctttttttgagatggagtcttactctgtcacccaggctggagtgcagtggcacgatctcagctcattgcaacctttgcctcccgggttcaagtgtttctctgcctcagcctcccgagtagctgggattacaggcacctgccaccacgcctggctaatttttgtatttttagtagagacggtgtttcaccatcttggctaggctggtcttgaactcctggcctcaagcaatccatctgcctcggcctcccaaagtgctgggattacaggtgtgagccactgcgcccagccttttttttttttttttttttttttaataatggggatgttgatctttatctcaggattgttgaaggatgaccagagctaacctgatacaccgtaagtttttagtattttttaagtaaatgaatgactgtccctgagaggcttcaattcctccagattcacactcacctgtatcctggtagtgtctgtgattccgagcactggttttctcatgtggcgacgtcccactgtatcctgacatcactttataaccagattttcctttgaagcctagcttcactccctgggccaccattccacccatcgtggctggagaatctgtgtctgaagatgatcccacatctgattctgactcagaatctgtgacccactcagaaagtgccttccactctagggctgatcgctgtatggatagttcctgaagttttgttagaaatcccagctctgtcaaagatccctgcttggatttggctccctggactggcgttgtttgcttgtctgactgttcaggtgtctcttgggacgtagattcagtcggggcagatggctcccttttggctccaggtttagcctgggccgcaggtgttgattcagcttcttgttgagctggaggtggctctcctggcccaggccctggctgggctacatgtctttgtctcaatgctggctcctgttgagttatagattcttttcctagcccaggtccctgctgggaggcagcttcctgttgagtgagcagcaccctttggatgtaaggtgattgctgtggtgcgggcttctgtggggcaagaaattcctcttgtgaagcagatttttgttgggctctaggttccttctgggattcagcatcatgttgtgcaggggtctcctgctgggtgaggggtctttggtttgaagcaggcttctgttgggtattggatccctgcagagtcttcgattctggctgggctatgggtgtcttttctggcccaggctctagcggggttataggcctctggtgtggttcaggttgccagtctgacctagacactgacttagaacctggctccattgttatttccctcacgggagatattgatcttccaggttctatccttctgggctcccacccagccctctctcttcacagatctctcattgattcctcatgatggcacttcctcttgggtttcactccatcctagcatcactggtcttcctttttaaggcagctggcagttggccgatcacagctggcccccactaagtaatgaactctgtgcctctttctttggtgggaggattaggaataggaggaggctatgtgcctagcactctcttacaagaagggaggggcttgctctcttgtgtcataaatagggccccaccccacccaccactccgttaaaatgtttcttctcataaggcaagcatcccaatttaggcctccgtgtcatctgggatgacagaagccagatgctggatgagtgttccttttttctctttccttctaatgtctgaggaaagcgtcattcagggggcagtctctgtagttgttgtaataattatttccctctttgttcattcctacaaatggttgccagattatttatttatttacttattgagacaagtctttctctgttgcccaggctggagtgcagtggtaccattttggctcactgaagcctccacctcctgggttcaagcgactctcctgcctcagcctcccaagtagctgggactacaggcgtgcactgccacgcccggctaatttttatatttttagtagagatggggttttgccatgttggccaggctggtctcaaactcctgaccttaagtgatccacccccaccccccgcccccgggcctcccaaagtgctgggtttacaggtgtgagccaccacgcccagccaggttgctagtttaatttccttatattgtcattctgatcatttaactctcatgttaaaaactaatgtcatgccttcccacttttatagcttgaggcccttctgaatggcatttgagatactccatgccatctctctagccctgaactatgatcctgtactagattggaaactcacagaagacagtgaccactgatgacaatgactgataatgatggtggtaatggtgatgatagtagtcataaataccaaaggctgcctaagtgctaagaaactgtgccaagttttttttttaaacctatattatctttaataagaccgtgtctggttcattggtatgcttttttttttttgtcccacctcgctcttacctcagaaagatttgtcgaatgagtgaaagatgaacaagtaggccaatggagacagagtgagggtcttggtggggataagtatgtgtagaatctggattcagtctgcagtgaatagggtaaaatgggtcatctggttgtgaattggcagaccccatttgaaggaaacaattttgatctgtgacatttaaaaatatttattgacttctgtttgctactttcctgattgcatttaaggttaaatgacactagctaggaagctacagtttcctggaatctttcaggtaattaagcctaagcctgggtaaggggagggcacaggctaagactgacgagagaagaagacactagagagagcaacaaacaaaatgatcttgaaaaacatgctttttgagagcactggaatgatttaggggtgggtacagtgggagagtgaggtgggagaagaagagtgtctggtaggtgtgctcactgtcttcttggctgagaatgtttaattggaagagtgggcgctcagagctcctacaaaggcagagcaaagcttcttagctgacattgtttgagaaattgctggcaggctctggaatgcttgtttggctttctgtggtgcctttggtgtcctagggtgcaaataaaggggagaggctagtgttaaaaccatttttaacatttcttttttttttggagacggagtcttgctctattgcccaggctggagtgcagtggcaggatctcaactcactgcaacctctgcctcccgggttcaagtgattctcctgcctcagcctcccaagtagctgggattacaggtgcctgccaccatggctggctaatttttgtattttagtagagacagggtttcaccattttggccaggctggtctggaactcctgacgtcatgtgatccacccacctcggcctcccaaagtgctaggattacaggcatgagccaccatgcctggccttcacatttaatttttttttgagatggagtctcgttcagttgcccaggctggagtgcagtggtgcaatcttggctcactgcaaccactgtctcccagattcaagcgattctcctgtctcagcctctcgagtagctgggattacaggcacccaccatcatgcctggctaatttttgtattttagtagagatggggtttcaccatgttggccaggctggtcttgaactcctgacctcaggtgatccacccgcttttgcctcccaaaatgctaggattacaggtgtgagccactgtgcccagccaacatttaatttttatgagagttttaaaaattataaaaataagactcatccagtggaaaaaaattttaaaatccagtaaaaagtaaaaggactcctcccaccccagcctctacaacacattttccagggctaaccactgttaatagtttgctacgtatttttccataccttctggtatataaatacaatggtttattttaaaaacaaaaatgagattatactatacgtattgccttagtcggcacctttaagaaatctggccgggcatagtggcttgtgcctataatctcagcactttgggaggccgaggtgggcagattgcctgagcccaggagttaaagaccagcctgagcaacatggcgaaatcctatctctacaaaaatacaaaaattagccaggcatggtggcgtgtacctgtggttccagttgctggggaggctgaggcaggaggaatgtttcagcccaggaggtgagccgtgatcatgccactgcactccagcctgggtgacagagcaagaccttgtctcaactgcgcccctccctctgcaaaaaaaacaactgaatctattattgcaaagtattatatatctatagaagttcatagaaacctatacatgcaattcaataaatagttataaagcagatattcatgaaactactacctaggcttagaaatagaatattgtgtccgggcacggtggctcatgcctgtaatccctgcactttgggagcccgaggcaggcagatcacctgaggtcaggggttcgagaccagcctgaccaacatggagaaatccatctctactaaaaatacaaaattagctgggtgtggtggcgcatccctgtaatcccagctcctcaggaggctgaggcaggagaattgcttcaacccgggaggcggaggttgcagtgagccgagattgcgctattgcactccagcctgggcaacaagagcagaactccatctcaaaaaaaaaaaaaaaagaaagaaagaaagaaatagaatattgccaacagcacccctccttttctgatcactgctttctctccccctcacagtgataatcttgacttttatagtaattatttactttcttttctttattatttaccacctatgtgtatagattcctaaataatttagtttattttttctcatttttaaactttatgtatatattatggtctgaatgtttatgtctctccccattttttttgtttttgtttttgagatggagtctcactctgttgtccaggctggagtgcagtggcgtgatcttggctcactgcaacctctgcctcccgggttcaaataattctcctgtctcagcctcctaagtagctgggattacagatgtgcaccatcacgcccggctaatttttttgtattttaagtagagacggggtttcaccatgttggccaggctggtctcgaactcctgacctcaggtgatccccctgccttggcctcccaaagtgctgggattacaggcatgaaccactgcacctggcctcactttagttttaattcacattttccttgtaataataaggttgagtgccattgcatctgtttattagctgtttgggtttcatcatctgtgaagtggctattcaagtatttttgcccgtttgtctgttgtatttcctgccctcctctcactggtctgtagcaattccttatatatgtattctgaatactaatcctttgaaggttgtgtatgttacagatatcgtctcctatttggcagcttgtcattttattcttttgatgatcaaaatttcataatctcagtgaagtcagatttatttactcttttactttatggtttgtgcattttgtattttgtttaagaaaggctttcatacctcaaggttgtgaatatattctcctgtatttccttgtaaatttgtctttcaaatttagatctgtaatccacctgaaacttacgttaatgaaggatgtgaaatagggggtctctacatcatttttttttcattaatatattgtggatatctctccagccaacacataatgatttatctcattattattattattatttttattattattgttattattatatttattttagagacaggatcttgctatgttgcccaggctggtcttgagctccttggcttactggatcctcctgcctcagcctcctgagtagctaggattataggcctgagccactgcccctggtttacttaattatttttgacagtaattagtttttcccaatttgcctttgaagaaaatttcccccatttatttgtcaatacaaatactgctataattaatattcttgtacctatattttgagcatccatgctagtattccattgttgagatttcctaaagtaagattactaaagttattatactcatttacaattttgatacagccaaatttattttacttccgtcaatagtgtataaggatcctgatatatcccattcttgataatatcataatatcaatcagtttaacatttgccaatttagtttttttttttttttttttttgaggcagagtctcactctgtcgcccaggctggagtgcagtggcatgatctcaactctctgcaacctccacctcccggattaaagcaattcgcgtgcctcaacctcccgagtagctgggattacaggcatgcaccactatgccccgctaatttttgtatttttagtagagacggggtttcaccatgttggccaggctggtcttgaactcctggcctcaagcaatccgcctgcctcggcctcccaaagtactgggattacaggcatgagccactgtgcccggctgccaatttactttttatatgacacttaaaaactggtagactaaactgggtgtggtggtgtgtacctctaaccccagatccttgggaggctgtggtggaaggatcacttgagcccaggagtttgagaccaacctgggcaacatggcaagaccccctactcaaaaaacagaacaaaataacaaacacaaaactgctagactagggaggagtcaaattctgtttgatgctgacactggtgtaatcttcagagattaatgaccagatctccaacagccccatctacccccactttggtaaacagtgaggttttaaaatctaagaatttggttaaacctttccagtatcaggaaaattgtatcctgcttttcctctcttcctatttcccgacaaggtgacattgagtagaaagggctgagttgtgtgcttatcctggtcttaatttcacctcttttttctattctcaacgtgcttcttccctagtgatttcacggagtgactctggtataaggaaaatcatcctttggaaacttacttgttttcttcacattgcccttgaaatgatcacaggggcactgcttctttggcagcccagacactgtcatgaattttcttctcggggctctcaggaaccaatctggaacaacagcattgctgcttagatgggagagttaatacatttgataggagggagtaggacagagctttaatcgccatcttctgtgccttgcatttccactgcaatggggtgggaaaaggggtcaacagagaacagtgtccatccagctatttgaatgccagtatttctgagttgtttttcctgacaactttgggcaaggtttgggcaagggtttgggcaagggtttggtggcaggtttggagggtgcatcagaatatcattactccaaagaatgaggagtaaggcttgggtgtctgcttttcagtggctactttcccttggggaagccattttgcctctctgctttcagtcttgcctgtgagtaaaataaggctgagaataggattcaggaagcttttggaaggccaggaaaaaataaaaaggcttttggacggtagctctgggttcttcaggaaaaggataaggggcagggcgcagcctgacatttggctggctttcccctagaccttggagaagtccagttcttgcctgagagtcaggaagaaagtgggcacaggtgctgcatgtggcaggctgtggagaggggaatgggtgaggtcagctgagataacatctgcattggtctcagaggggcccaagggagagagctggggtcatggtgatgccatcgctgttgttgttgctgaattactgacctttgcactcacattcttggccgccttcctggagccatctcctagaagcctggcctcggtccctgtggcctctggcgacccctgtcggaaggaaacaggtcacatccagacactggaaagggcacagaaatgatcctcccagcattgttctacctaggtcagcacagttccatttttccatttttacttcaagaatctaggttacttcaagagatgaatattttatttttatttatatttttgagatggggtcttgctgtgttgcctaggctggtcttgaactcttgggctccagtggtcctcctgccttggcctcccaaagtgctaggattataggcgtgagccactgtgcccagctgaggggtattttaatcgataagggattgaggtttaaaatctggcctatacataagcatattcaaaaatttaatgattaaaaaaatctggcctagagaaaagcttagctgaaggtaggtggagaaagaatggcttctagatggaagagatgataaaaggcaggggtttgtcgaaacctcctgccctctcctcatacctcacattaaaatcctcatgacttaaaagagtgagagcgaggaggagattattccttaaatcaagattttcccttgacctccaagttgctgggttttttgtttgtttgtttgttttttgagacagagtctcactctgtcatccaggctggagtgtagtggtgcaatcacggctcactgcagccttgacctcctgggtttggttggtcctcccatctcagcctcctgggtagctgaggcttcaggcatgcaccaccactcctggctagttttttgtattttttgtaaagatagggttttgccaagttgcccaggttggtctggagctcatgggcgtaagcgatccgcctgtcttggcctcccaaagtgctgtgattataggcatgagccaccacacccaccccaagtagctgtatttgaatccagagtcccagttcaactattaaacgatggtatttacctttgttcctctggaacaaatacattcttcttttggcctttatccgagcctgttttattttccgattctatcttatctccattttttgatacttaaaatattcctatgacaggctgggcacggtggctcatgcctggaatcccagcactttgggaggctgaggcaggcggatcatgaggtcaggaggtcaagaccatcctggctaacatggtgaaaccccgtctctactaaaaatacaaaaaattaggcgggcgtggtggcgggcgcctgtagtcccagctactcgggaggctgaggcaggagaatctcttgaccccaggaggcggaagttgcagtgagctgagatcgtaccattgtactccatcctgggcgacagagcgagacacggtctcaaaaaaaaaaaaaaaattcctaagacaatcaagaatgatggtttatagacttgagattctcaagtaagagcttggctcagatgacacttcctttatggtagtttctgatatttcctgtcaacatgaattataccttcatatggttcccattgttgttgaatgcagttctgttattgcactgtaatgttgttgtttgaaatcttttatggactgaattgtgtctcccgaaattcacatgttgaatccataacccccagtacctcagaatgactgtatatggagataggacctttaaagaggtgattaaaatcaggctgttatggtgggccctacaccagtctgcctggtgtccttataagaaaaggagatttgggctgggcgcggtggctcatgcctataatctcagcaatttgggaggccgaggtgggtgaatcacaggtcaggagtttgagaccagcctggccaacatagtgaaaccctgtctttactaaaaatacaaaaatgagcagggcatggtggcgcgtgcctgtagtcccagctacttggaaggctgaggcaggagaattgcttgaacccgggaggcaaaggttgcagtgagctgagatcataccattgcactccagcatgggcaacaaagcaagactttgtctaaaaaaaaaaaaaaaaagtaggggggatcctagagagctctttcattctctttccacctcttgaagataagaggagaagtccactgtctgcaacctggaagaggacccttgccagaacccagctgtgctggcaccctgatttcatatatccagcctgcagaactgtgaggaataaatttctcttgtttatgccacccagtctgtggtattgtgttatggcattcctagcaaactaaaataaaatatttctccttcactagactctgaaccattggttcagtagtcattcaggtacgtggttcctaacacatggtaggcatttggcaaatgtttgttcaacacgtggatggataagttgtttggagaggacccttagagatcatatggttcaattcaggcctcctacttcccagacttctgccacacagatggagggggttgcgtcatttccccaagggctgcttttccaatgttctcatgtgctgttttgagtgttatcaaagtaatttaagcaggcataggtcctgccatttaaacttttctaacatttttactcttgcctgacctctactcctagttccagagaaaaaccacagaatattagaccttgaaggaaatcccagagattatttaattgaattccttaattctgaagtttttttttttttcagtctaaatgtaatttaactgttggagaaaattttgaaagtacaaacagagaaattattattcttaccaactgttggtattttggcatatttgttacctacatatgctttttattaatatagtgataaccatagcatgtaaacacattctctttttccattcataggcatgttgctgtgtcatcttcataacacatttttaatgaatgcataatactctcaataattatgtgttccaaattatttaactgctttcccattgctgaatatttagaaagttttattttttagatgttggtaaatttctttgttcttgtaactgttttccaaattttagattattttcttgagagagagttcccaaagtggaattactgggtcaaaagttaagaattgctttcagaagagctatactaatgtttaaattttttttcatttaattatttatttattttttttgagacggagtctcactctgtcgcccaggctggagtgcagtgttgtgatctcggctcactgcaacctctgcctctcgggttcaagcaattctccttcctcagcctcccaagtagctgggattacaggcacccaccaccatgcctggctaatttttgtatttttagtagaggcaggttttaccatgttggtcaggctggtcttgaactcttaacctcaagtgatccgctcccctcggcctcccaaagcgttgggattataggcatgagatgctatgcctggccactttatactttttctctaaacaaatttattttgcaaaacatcctcatcctatgcaatattatctgtgaaattacaggtttgatgtatgcttagttttttcctaacatgcattggaataaacacataaatattaaagtaaaaagaagcttatttactttccacctaaaatcagttttgggaaccactgatacagtggcataagcatgcactttatatccacataggcctggggtcagctactggctctgtcacttaactgtcgacttggacaagtcacttggcttctatgatccttgattccctgatttgtgaaaggagggtggtaaaatcctccttgcagagttgttgggaataagtgagctgctgtgggagcccagtgtccaggcgggtgttgagtacatgatggttatcattgtgtttattgctgtggaattctggttattttccaaagtgagtgtctatgctggaatattgggcttgtggctttctgctgatgtggatgtgtaaagaagttacttccacttgttaggatttgtggtgcatctgtcattattttcacttcccagatccactacatatttgctttgtgattttggacaaagttgtgtaacttttctgtgcctcattttcctaatttgtaagatgtggttaataatattcctcccttatccacaggggatgcattccaagacccccaagatacttcaagtctcagatagtaccaaaccctatatatatattttttctacacatatacacttacgataaagtctaatttatgaattaggcacagtaagagattaacaataagatagaacaattttaaaaatatactgtaataggccaggtgggggctcacacctgtaatcccagcactttgggaggccgaggcaggcggatcacgaggtcaggagattgagaccatcctggctaacacggtgaaaccccatctctactaaaaatacaaaaaattagccaggtgtggtggcgcacgcctttagtcccagctactcgggaggctgaggcaggagaatggtgtgaacccaggaggcagagcttgcagtgagccgagattgcaccactgcactccagcctgggcgacaagagactctgtctcaaaaaaaaaaaaaaaaaaaaaaaaaaaatatatatatatatatatatatataaaatacacacacacacacacacacacacacatatatactgtaatgaaaatgacgtgaatgtggtctctctctctctttgtctctttctcaagataacaatatttttggaccactgttggcgggtaactgaaactgcgattaagtggggactactgtacatgagtgtgcgtgtgtgttatttcccagctctgaccactagagggcctagaagcaccagcacctactagcaatggacctatcagtcagtgcccatagtctgtaaatatcattctcccatgaaaggaactagggcttccaggaaaaatagctgatccagggctggggcagaaaaacacaagaggagcccaaagcttcttgtggtgtcagaaagtaaggagctgctcaaaaaatggtggagatgtgtctaaaggtcacagaagccaactagaaggagctcccaatggccaattttgggacaatatgagcaacataataaataatgatagtagtggattccaacccataaatactcatgagtccatgctgatataaataaataactgaacaaataaataaataaggaagaggctaggcatggtggctcacgcctgtaatcccagcactttgggaggccaaagtggggggatcacttgaggccaggaattagagaccagcctggctaacatgacaaaaccccgtctctactaaaaatacaaaaattagctgggtgtggtggtgtctgcctgtagtcccagctactcaggaggctgaggtgggaggatcgcttgagcccagaaggtggaggcggcagtgagccaagatcacaccactgcactccagcctaggcaacagagcaagactctatctcaaaaaaaaaaaaaaaaaaaaagaaaaagaaaaaggaataactctttcttatggcagaattccgattaaataaatgtagaaggaacaatggaagtagaaaatcactatttggccaacaccacagtaataattctttataggaaacaatcatccatagattctaaaagttaatattaaaagtatgatgatgccataactggtgaataacaagaaaaaaaaaagtatgatgagaagaaacaggctatttacatatttccaaagtgtctctccacaagatacttattaattacaataagatgaatagtaactttacagtagagaaacctggcagacaccacctgaaccaagtgcttaaagtgaacctcatcagtaatgagagatatcgacatcctggggctcttgctgggatgtccagagaaggatacatcacttctgaagtattcttgcccaaaatgtgtagccggaaatatcagacaaacccatattcagggggcattctacaaaacaactggctagaactcttcaaaagtgtcaaggtcctgaaagagagggaaagactgagaaactatcccaggttggaggagacctaggagatctgacattttattcagtgggatcccagattggagtctggagcagaaaaaggacatgagtgggatgattagcaagatttgaacatttgtagattagttaatattatggtatcagtgctaatctcctggttttgataattgtattatggttacataagatattgtttgaaaacaattggatgaaggctgtactggaactctatttttacaatatttttcaaagtctgaaaaatgaaaagtaagaaaaagtaagaaatgcattagatttgtgaggacaaatgagatagtaagtgtgaagtgattagaacaatgcttgtgatataggagttcttaatgtgtctgatattataagtaattttataattaaataatattataattaatgaataatctgttattttaagtaatttatttcctaatgacctcatatattctcacttatttctatttcccttaaccctgtgaaaagcatattgagcatgtatgtgattaagagataaaataagattagactttattctgagatttattttggggatggaggagctattatttcctttagccactaagtagctcagactcaggcctgcactgcaaaactttgcttggctgggaaacaagatttgagcccggccgccacccactcgacgtggtttgtgatggcgccccctggtggcgcagggagctttccccagttcctcaccctcgtgctttaggagcgacttagaaactactcagtccatttattaaaccctttctaggacacgctgcggatcatttaatcttcacaagtgtgtgtgacaagtggtattttcttcattttaagatgataaaactgaaactcaaaaaagtgaggcgacttgtctagggttgcaaagtgtgtggcagagccaggatctaggtccccctgacttccaagctgagtgtaaaggtctaggtgagtctaaaagtgtggccatgcagagaagtattggtgtagagcagtggttgttgaccaagggtggttccccctccggggtcatttggcgatgtctagagatatttttggctgccataacaggggtttggatgagggagaggggaggctgctattggcatgtaggggagagaggccacgcggatgctgctgaacatctcacaatacacagaacagcccccaccgcaaggaactgttcagcccaaatgtcagtagagctgctatgaagccctggtttgatttagcaacctgaggatgcattcttgcagttagctaatgtttgctgagtactgagctggatagcgtgagggatatggaaacagtgcaccagtctgtgtcaccaagtagtttgcagcctagaaggacagggggtgggggcaggaaaggcacatgaaggccctcaatataaggcagcagatgataagtgcaagaagagagtgtccagcagggctaagccagcgctcaggagggagaccacatgtctggctgtgggaggaactgaaggaagctgtgggaaggtggttttgagctgggtgtgtgagcaaagttgaactggtggaaaaacacaatacctgttcagggaagggcaaacaggttagtttggttggagaaatagtatttttagtgagtagagggaggtacactagaaaggcaggttggggctacagctttgaatccaggcagaggactctagcctgggtgtctgtcatagtgatggaaaagtcttccctttcagaacagtggtctaggccctagggctatggggcttaacagcttccagagcactctctctacaaaggaggggatgttggaaattggggtggagaagggagaatgcctcctgattttaggaccaagttgatgctgagtatgtaacatagccatttcacctcaaagtggcctttggggagatggtgctcacaagcggaaatatacatggggatcaggtcttttctgcgtggttgctctgtgcagggctgggccactttatagtgaaagctggagcagatttggaacccctaagctaaagtcggcttcccaaaatgtgagctgttacagcagggcttgctatggataaagcttcaaatatggacactacctggtgacaggctttttctagtttattacgttaccagtaaatagcattaagacatgttggtggcattccagtgcactgtaaagaatagaagcaaggacttcctgatcttctataaaggtaccattgccttcaacactctcccaccatcatcattaagtttagccatgagaattatgttactcttttggaaaagtgttgggggagaaggcatgggagcaaatctttgttgagctagtatatacatacatacgtacgtgtgtgtgagggggatcagctacaattgcagatatcttcttttcttttctttccttttttttttttttttttttttgagatggagtctcactctgtcacccaggctggagtacagtggtgccgtctcggctcactgcagcctccacctcctgggttccagcaattctctggcctcagcctcctgagtagctgggactacaggtgcgtgccaccaggtctggctaattttttgtatttttagtagagatggagtttcaccgtgttagccaggatggtctcgatctcctgaccttgtaatccgccctgccttggcctcccaaagtgctgggattacaggagtgagccaccgcgcccggccagttgcagatattttcacatacaatatctcgtttaactctctcaacattgtttgggtgtaagtacagtttgctgtttttttgtaaaggaggaaactggcattgagaaaggctcacttgccccatcccccatagctaagagaagctgcattttgatgtgtctgtggcctgttttgccacatttctccccccgttttccccttcatagacagtcttgtttacctggattcaggctgctagagaccatggacatcagcattagtggcagcaacaggaggagggaagagattagaactttcatcgcaactgtcggtgcagctgtaagttgcttgaagaatataatggaaggttccctgctggaggctcctgatccctggggatgactcaggtcaggatactcagcctggtggtctatgctttagtcccaggccagcgttcccatttgagggcgagaacaggtgaggtgacgctgtcttgctgttacgtaacagattagaccatgtgctttatgggaatctgggaggtgaaactggtcaaacaaaagaaattcagcattcttaagaacataagaaggtgactgataacttggcagctgtgccagttctctcctgtactctttcccgcctcctcacaccccaatgcctcatgatttcttcctcaaatctttttttcttgcttggatttccttatacctttcaatgaccctctctatctgaatatttggcaggaaagtggatactaagtgttggtagaagagactttgacaaggtctgtttcccctctgtgctcctgctcccatccttggcaaaatatcggcaatagtagtgttgttgcctgggaagttgccctgtcctctctctgttcacaattccctccaattctgcagccacataagatggcagcagagcaggatccgggacaagaggcagctcccctgccgagaacaccgcccctggagcagtgggtgacaccaggcctccttgtgtgtccatcgggaaggtggccatggcttagttgttctggtctaaaggggagggaactgggttgggggaagagacccccagagctttaggtctcagagggtttgagaaacaggagccacaggagggaaggagccctgaagtgtgtttgcccagctgctggggcgcctggctccagcccttgtttggaaatggccccgggcaaaagaagaaaggtaataatacttgaagtaaacattaggggcatagaatatcagcactcactaaacttgacatttatttgagactttaggaaatgtgctcaaagggagaggagaggctgggcttgaatgctgggtgatattcatgggggctgaagggaaggctaacaagggagccctttttttggaagcctccaggcaggagtgagagcagggggtgtgactttatttccctgagagaaggaaagaggaaaggcatgagtcaaagccctttggttttgtttgaccattcttttttctccacgttttcaaattatctcggcctgttgacttgtcacagagttgattgtggactttgctactgcagtgtttataaagcactgcaggggccagggactgctatgactgagcctgtgtccaagttgaaggctcagggtgggcctaagcttgttctgatgcaaatcactgatgtggcttctttctggaaaattctaaaaccagggagatgacatccatttcataaagcctagagatatgggtgcagtcatctctcaaagtggcaggagtgcagggggactgagagggacttggttgggtggaacttgagctggagttgggggaggatttgggttggtggagggcagagaggagggccgtgcagagcaggggcgtgttgtaggagaggtgcctcctggagctcattggatggggattttagaggacaggagctgttcgtgttcatttttgtattgcttgaacttacacagggtctggcactttgggagtattctataaatgactgttgaatggaatgattgttttgtagcccattaactgggcctgatgtattagaaagtgtgcgaaaatgtagcccattagcagaaagaaaatcttactgaaaaaccatcccatgtacaaatggagcctggtgcggccactttacttatgctgctgagttctgcatcagtccacacccaggccaccgcaggggccgggagctcctcctcagacctacctcccgtgcctcagtctctttacccctctgttcttccaggtcctgctccctctggtttcccctccatgcacttggggtgggtgttgcatcctgtgtcccattggagggggcttccggtctgttaggtctattaatataaaacacccccaagacaaatggacttttttcttgttaacatcacaacttcttatgatgcatctcaagaacattatttgtgtcaagagtctctctgatgtacagaggccctccattcctcaggaggaggtaaggggaatttgggagaaaacaccgccctgcctgggttacttatttccctattctacagtgtacttggtagacattcaaaaatatttgttgactttgtccatgatccacatggctctcatatagtcatttattcacacatacattcagtgagactttgagcgcctagtgtgtgcctggtatttactagatggtggatgctgagatcaggtgtgctgctgtctctgaggagctctcactatacagtggcacctagggtgaccgaatccacctgccccactttacagacatggaaattaaagtgcagggaagttataggattagttcaacaacacagtcagtagcctcaaagttacaggagtaaatcaagttttctgacttgctggattttctattagtgtgcagctacctggctgctgcaggtgtagacgtggtgagctccgataggagagaggacgttcagagtgaaatgggagccctgagcaccctggattaaccgggaggacataccgggtccagctgtgaccgcacaaaggaccatcagggatatttgtattctctttttcactttgagcttgaaatgaagaaaactgaccccaggaaaccaagagtggaagatttttcacaggggattagtgagatgcgtcaaaaagcctgtgttggatgggtgcctgtaatcccagcactttgggaagctgaggtgggaggatggcttgggtccaggagtttgagaccagtgtgggcaacatggtgagaccctgtctctataaaaagcttttttgtttcttgttttaaaaagaaaacccttttctgatgtctgtcacggtgtttctcactgaatggtaatggtctgactttgagtgggtttcatccatagcctggagctctgtgaggcagggaccaggtgtgattcacctttgtctctccagtgacagtacacagcaggatccgataaatatttcttacaaaataaaactgaataaaaagtagacatctgcacaggtgtgggatgactaagcagcagcaggagcaggaaaaatcagtccccccagatcagctgatacagcgttcagcttctagataggggtgaggtgccaggacggggatggggttcctgtggctctgctgctctggggaacacccctaggattcagagtgtaggctgtggttgctgcacttcacttgcccgtgggaaagtgagcagtgggtgtggggcttcaggtgaccctacgtgggaaacggccgagggaagatggggtaggtggcacatagaggttgtttttttatttttttatttttatttttgagacgaagttttgttcttattgcccaggctggagtgcaatggtacaatcttggctcaccgcaacctctgcttcccaggttcaagcaattctccttgcctcagcctcccaagtagctatgattacaggcatgcgccaccatgcctggctatttttttttgtatttttagtagagacaggatttctccatgttggtcaggctgatctcgatctcctgacctcaggtgatccacccaccttggcctcccaaagtgctgggattacaggcatgagccactgtgcccggccaaggatgtttaccaatatttgaaggtcggttgtataaaaaagtgttagacttggctgggtgcattggctcatgcctgtaatctcaacactttgggaggctgaggcaggcagatcacctgaggtcgggagtttgagaccaacctggccaacatggcaaaaccctgtctctactaaaaatacaaaaattagccgggcgcagtggcgggcacctgtaatcgcagctattcaggaggctgaggcaggaaaattgcttgaacccaggagggggaggttgcagtgagccaagattgtgccactgcactccatcctgggtgacagagccagactccatctcaaaaaaaaaaaaaaaaaaaaggaaaagaaaaaatgttagtgtcacatgcatccatgtgaagagaccaccaaacaggctttgtgtgagcaataaagcttttaatcacctggtgcaggcaggctgagtccaaaaagagagtcagtgaagggagttagggatggggcagttttataggactagggtaagcagtggaaagttacagttaaagggggtttttctcttgcgggcatggtggggagatcataagactcattgtccagaagaagaatgtcacgaggttgatcagtagatcaattgggacagggcaggatcaagtcatgacagaatgtcataaggttggtcaatcggttaagataggagttggctgtttcccttcttttgtacttgtcggttgcctcaggccatctggatgtatacatgcaggcttgggttcagaggcctgacattcctgtcttcttatattaataagaaaaataaaacaaaatagtgttgaagtgttggggtggcgaaaaaattgtttttggggtggtatggagagataatgggccatgtttctcagggctgcttcgagcaggattaagggctgtgtggaccttaaagaaaattttataataggttacatggaataggagtttaggctgtggggagatcttggggcagaggatggtactatggggttgttaaaagtagcatttgtcatatagaatgattagtgatggtctgaatgtggttttgtgtgaattgagaaaccaaacggaagacacaaggcccgaataagaggagaaaaagaggtaccagaggactaagaattgggaggacccaggatgtccaattagagagtgcccaagggggttcagcataattacttgcttgttggcgagtttttgggctatatccttgagtttttttttatattgtcatatactaggccagattgatttaggtaaaagcaacactcttcatttaaaaatatagagagtcctcctttttcagcagtgagtaagtcaaggcctcggcggttttagaggacaactgcagctaaagagtcaaccttggcctgaaggactcatagagtttgtgatatgtctgtgatgctagcagagaagtcattagagaggctctggaaggtcgtgacagaggctgaaatgcctgctattccagttctgagcgcaatagcggaggcagaaagtcctaaaccgacaagtaagggaattagtggaataacctttttttttgtcatgtcggtgtcatgagaggaacaggaagcttttcagtcccattcgcaaattgaattttgggagtaaggtaaactagtgtgcatgtgcctgtccaattagcaggtagacacatgtaggcagaggatccacagaggaagaagagaccttgtgcaaggcaaaactggaaatgcaaagtaaaaagatgagaaggaatactaaaagaggtgtcttgcactcagactcctagggatccagctagggcggcagccatcagaggttgtaatggggactgatggggtaactgcatagagggggaggttcgattttcatggtgtatgagaaaacgttgagtgtctacgagcaacctttcactgttatttacagggctgggtataagcaaacaaaaagagggcctgggaggagagtctgacgagcaaggggaaggtagtcaaggatggagtgaaatacagggtaagtgtcttcctaggaaataataactgctaatgtttttaagtttgccagtattgatagagggcttttctgtaatatggagctgggaggccccaattgtttcagtgatatgtgtagttgggctttggagatgaagagtgaaggaacacggagaaggtgaaaggttacctaggggaattccagtgggtctttgccaagagatacataaaggagtggccacaggaatagtagtttgtgttgtgaggggtccaaatatggggggagtagaattaatataaggagaaagattttttaagtaagtgcggagaagggcggcagcttgctgatgtgaaatgtctggggaggtcttgctggacctgtctagaaagtaaagaatttctttaggagggttaaggtgagggctgttaaaggaagttcggaggtgtagggagacaggagatgttgcttagtctgtatgtaaggcggggacagctgtgtaggcacaggaagaaagggaaatgcaaagccagcaattgttctctaaggagggatcagagacggctaggagagagtgaatgagactgatagtgtggtggagatagctggggagaggtagagggtggcataagaatgggaatgagaataagagtgagtataaaagtaaagaatagaacttcatcagggtggaagtattggagggtgccctgccagcaaagatcatctatccactctaagagggagttaagagtggcagtttggggatagcaccaggagatatccactgtgatggtttggaggaacagtgtaaactggcagtgtaaacaagagcagggcatttatgagtagttgagaacggtgaataagagtatgactagacagaagatagtagggatgacaagttttttggggtgcagtccaagtagtgggggtgactgcataaagccctgttgcaaaaagtagggtaaggatgaacagacctagtagaatgaagggacgtattaggctcatgagggttattactgttcttcagaaatacaagtgagtttaagggaagtaggggagagtacttgcgacttccaggaggaagaggagagattaggctggctgtttgatggacacagctttattctggaatggtgaacccaatggggaggatcctgcaggcggacagcagttggggtgctagagatgactaagtagggtccagtccattgaggttgtagagtttgaggggtcagattcttaacaagaacgggttgtccagctagggtgtcttcatatggctgggaatctggagtaggcaagagaagattagcagcctggggaatttcctgtctagcctgctggaggcctggaagatagttgcctagagggccggtgtctgggacaaggttggggccgagcaagaaagtgtgtccatgtaaaagttcaaatggactgtaccctgtagcatctcgaggacaggctctaattctgagaagggcaagaggtaaaagtactgtccagtcctttttaagttggagactgagcttggtgaggtatgtctttaaaagaccattagtccgttctacctttcctgaagattgagggcggtaaggggtatgaagtttgacttatttcagcctacagagagtaggatgagaattggtgagtgtgtatcagacacattttggctcaggatggaaaagaactgtcacagtaaagtaagtttccttgggaaattacaagtttactggtggagttcaggcctgagctgggtgtctgaaaatacctgttagagtgatttctaaggttacaagggcagagcttggcttgaaactaggtttcccactgataccacatattaggtattatacaaactgtcttttgcaatgagacacggccctatgatgcaggctgagctctctgacagttacttcctgtctttgtgggcgattgtgattttatctcctttgtgacctggactttacctcctaccctttgctcttgccagccctcccacttcctttactggtgacaaggtttaagtgcatttactgatgatggtcacaaggtggcagcactgcctcactggtgtttcctaagacctctgcttggacgtgggccagtctaaggtgctgttaggattaagggcatgaatgaggctaaaggtaaactttattttcctttttttatcctgtgaagtaacagaatttgaggtgagtgtgaagtaattgcatttgagaactggaagtgccatgtgtggtggctcatgcctgtaatcccaacactttgggaggctgaagcaggaggatggtttgagcccaggagttccagaccagcctgggcaacatggtgagacctcatctctacaaaaaataaaaaaattagccgggcacggtgacacatgcctgtggtcccagctacttgagagcctgaggcaggaggattcccttgaacccaggaggtccaggctgcattaagctatgatcctgtcactgcgttccatccagcctgggtgacagaatgagactctgtctcaaaaaactccaaaaatgaatacaaaattaaaaagtctggtagaaatgcttcacaaactttaatgtgctcacagatcacccaaagatcttgtttaaatgcagattctgattcttctggtggggcctgagagtctgcatttcttttttttatgattggcattttcacaagattctgcatttctaaggagcatttggacgatgtcattgctgctggttggtggagcacactttgagtagcaaggcttgagtatcatttagagattaattctcactgcatctgatttatggatggggagagactgaggtgtggagatggaatagagcttgccctccatagccatgccctcaccgcatgactttttgcgtttaaacccagggcttcagcctctttgtccagtccttgcctcatgcatcacatggccccttcactgttgttggtggcatctctttagcttaggaactcagaaccccatttttatcacccactctgggcttggctcaacatgtcactttgactggttttccccttactcaaaaccttcactgactcttctgtaattcacaagatcaagttcgaatgtctgtgtccagtgttcatgcctctataacatatgtatgatccccctttagcaagcttacctaacttccctggtttttgtttttgtttttgtttttgagacagagtcttgctctgttgcccaggctggagtgcagtggcaccatctcggctcactgcaagctccgcctctcggattcacgccattctcctgcctcagcctccctagtagctgggactacaggtgcctgccaccatgcctggctaattttttgtatttttagtagagacggggtttcaccgtgttagcgagggtggtgatggtctcgatctcctgatctcatgatctgtctgcctcagcctcaaaagtgctgggattacaggcgtgagcccaccgcgcctggccacttccctgtttttaaaccatctctttctgctctagctctccctgttccttcctgttccctacacatactctgttctggtctctctcagtggtagtggtggtggtatgggctctggtgttagactcactgagtttctaatccaacatccaccaacaaccttggcaagttacttcacctttttgaggatcagcatcctcctgtgaaataaccccacatggtggttgagaggagtaaataaaaaatcatctgtacctcataaatatatatacctactatgtacccccaaatgtaaaaattaaaaaaaaagtaaaacgacatctgcaaacccgctctcattcctgagaccctcttcaaagctagcatctacagcagtgcctgccacctggtttccttggcgtgtgtttctccttgtctctgctttcctaaggttgaacccttcaggacctcacctgaatcccgtctgttccatgaaacctttcccagccattcctgacccagttgatccctcgcttctataaattattttacctatgtatgggcatttaattacatgccagccctctcagtgagaccccatagggaggctggaagggtattggatgtgtgcgaattgaaggttaattgaatgaatacttttcttactacccactgagtgttagagctgccgtctctttttttcagctagtcccagcggcagttcctcctgcaccagctgcaccagaccctggcaggcatgtgaataccttagggattgctcttgtcagggtccttcctgcctctgggttttggttaaattggtgtttccttttgcacgatatcagtggtccctctaagggagagattgatgatatctctttatggaaatgccaagataataactgaggaagttgaactcaatatcttattgcttaaacagcctggttacaggagatgtgtacacactttcttgtttcgttaaaattacaacagtctttactctcttacttcagaagagactggggacaaaagaccaagtgggagtgtgggcaacatagggagaccccatctctacaaaaaaaaaattagctgggtgtggtggtgtgtgcctgtagtcccagctactttggaggttgaggtgtgaggatcgtttgaacccaggagctcaaagctgcagtgaactatgatcacgctgttgcactctggcctgggtgatagaccaagaaaaaaaaaaaaaaacaagtggggaggacagggtggtttaggggagttaatgtacctctaacctggattctctgaattgttctttcaatcatgtctggaagtgtacatctttgtatgtgtggtcatatatttatatcacatcactcataattccctgcctgtcagtggcaattaggagatcatgtcagtcaggcttaggatattaaaattatgtagtatgtgctttcactggagcaaaggtttctctgaagtctggagagaaaatggaccagtagggctggaccctttacttggggtcctgccttctctttttattggacagcagcctactcagccatcactttcccaatcaggggcttttttttttttttttttgagatggagtctcgctctgtcgcccaggctggagtgcaatggcacgatctcggctcactgcaagctccacctcccgggttcatgccattcttctgcctcagcctcctgagtagttgggactacaggcgcccgccaccatgcctggctaattttttgtatttttagtagagacggggtttcacggtgttagccaggatggtcttgatctcctgagctcatgatccacccacctcagcctcccaaagtgctgggattacaggcatgaaccaccgcgcccggccaatcaggggctttttaaccttcccattttcctataaaggatccatgccaatgttcagatatatttattgtgcctggaactggatgttcttttaaaaagtgaatcccagggatggcttcctagcagatttccaggattctaatcttcactgtctaaactgtgggtttccaaccttgaatactgattagagtcgcttgtagggcatttaaaacctaccaatgcttgtgccttcccccaagagagtgtgatttgattgatgcatgatgtggcccacgcactggttgtttatgaatgcttccaaggaaaatggtcattttacagtgggggaactgtagcccagtgctcaaagttaacatctccagtaatcagagatactgacatcttagggcatcctaatatgatggatggagaaggcgcagcatcacctctgtagtattcttgcccaatgtatataactttagtttcatcatgagaaacaactaggaaagcccaaaccgagggtcattatacaaaataactcaccaatactcttcgaaaatgttaaggtcatgaaggcaagagaaattctgaggaactgtcccagattaaaggaaactgggaggacagagcaatgagatgcaatgtctgatcctagattggatcctggtccagaaaaagaacattagtgggaagataaaggggatttgaataaggtctacagattcattcattgtacagtatcagtgatcatttattgattttgatgattatactgtggttatctaaaatgttaatatttggggaggctgagtgaaaagtatatgaagaccctgactatttgtagaagttttttgaaagtctgaaattatttcagatgaaactaaagaaaggaaaagaaagcttccaggtaattctactgagttgccaaagctgaaaaccacttctctaagttatcttgcttaataatactgtcaagagtaatcttcctggaaataccatattgttatgtttgtgaccttttcaaagctttccagtgattgctgtcatctaggatgaagttcctgctccttaggctaccatttaaagcccccatagcatggcctcaatctactccgttgatctacgtggaaggacttaacctacattttactttctcatgcctgagcttattctaattcttttactccttcctatataatacccttgccttcctgttcagcctcctgagctgttctttgtgctatggcccatttcagaccctgtctcttcattgaagcctgtatagttattcctgttagaagcaatcatccttcctttctttgaattctggtaggtaccgtgatgtggagtgaaccacgagctttagattcagaaatatgtgagtttgaatcctttgacagttccacctttaaccagttctgagataagggacaagtttatcaacatcttggaatagaggggtaatagagtacctgcatcaaagggtcattgtgaccattagatcagatgcaaacataaaggtcctcagcacagcatatagcagattctttcctcagcactttaatagctcagtggttcccagaaagtttgtgggtggtgtgaaggctcttatcaaaatttcctaaagagccttttaaaaatatttgcacctggtcatcactaagatgacagatgctctttaatggaactgaatgcttgggactttaagaaatgcaactgagatttttttttttcccccttggaacacaactgagtaaataagtgacctaagggcagaggaatgtaacccaaaagagggagaaggaggaactgggtttttaagtaggaaaaagctgtgatgccttccacacccactctgttgctgtcagtgagacagcagtgaggaagtaccactccctagtacaactccttaaaccatgagtcctgaacagcccttcactaatccattccctgtccagatgatgtgtacctggatgagtcagatccccatgagtcaatcattcttctccgtcttcagctcctccatcctcaccactcagtgctatgtgctatggtctggccccacttcccaggccattagtattggcctaagaaagcaagactgggaggggcaactgagaaggaagtcagaggccactaggcatggaaagaggcaggtggggctgtcattgctcaaaggccacacactctgggtgtgttttatgactgttcctggatttgaaatcttttcccctttgtgatcattccagagactcaccctcctcctgcttccttctcatcacactatctgttcctagtgcatcccttttacggccagagaatggctgtacaaatagttaacaattcagtaaaagttacagctgagcacggtggctcacacctgtaattccatcacttgggaggatgaggagggcggatcacgaggtcaggagttgaagaccagcctgaccaacatggtgaaaccccatctctactaaaaatacaaaaattagctgggtgtggtggcacgcacctgtaagcccagctactcaggaggctgaggcaggagaattgcttgaacctgggaggcggaggttgcagtgagccaagactgtgccactgcactccagcttgggcgacagagcgagactccatctcaaaaaaaaaaaaaaattactttttgggagaactgggaacctggccttcctttttgccaaaagagattgaggtccataaaagccagcttttattccgggctgtgcagttgtgagtgtggtgttagggaacaggtacataagtgaagggtaagacagaaaacaaaatgctggctgtttgtcaaatcctgagagtagaggggacaaaaatcattctgaaaggtggatgtcattcaggacaccttggaaatcttagggtgtcctcgcccagatggggaggaggatgaggttaaattatggagttgagtgacacttggtacattactaaacttctctgcttcagtttttttttttttttttttttttttgagacggagtctcactgtgtcgcccaggctggagtgcagtggcatgatcttggctcactgcgcgctccgcctcccaggttcatgccattctcctgcctcagcctccggagtagctgggactacaggcgcccgccaccactcccggctaatttttttttgtatttttagtagagatggggtttcaccgtgttggccagcatggttttgatctccttacctcgtgatccgcctgcctcggcctcccaaagtgctgggattacaggcgtgagccaccatgcctggcccctgcctctgtttttttaatctgtaaaaatggggatggtgacactcaggattctttgagaggactggagctacatggaaaccccttgggatagtgcctggcggatagtgagtgctgcatcagtgtgagctattataattatgggaatagacaaaggtgtcacccggggcatccagagtgaggaggtattttccagtcagagtcctgggaggccagctggagatgaagctggtgaagggggaggcttaacctccaggagtggaaggattgggaaggagtaactcatgcataacattctgtgaaaatacctttacccaacagcaggaatacgcacagtgggtgtggcttctgtcacaattattgtccctggggtctaggaatgtgaaacccaagcctagaaacaggcttcaggggtgccttgcaaattagcattcatcttgccaaaggaaaatgttcatcttgttaaaagaaagcatttacgtgctaaaagaatcccttcttgtggcccaggtcattatttttgtcttggtactatccttttttttttttttttttttttttttttgagaaggagtcttgctcttttgcccaggctggagtgcagtggtggatctcagctcactgcaagttccacctcccgggttgacaccattctcctgcctcagcctcccaagtagctgggactacaggcgcccgccaccatgcctggctaattttttttgtacttttagtagagacggggtttcactgtgttagccaggatggtctcgatctcctgacctcgtgatctgcccacctcggcctcccaaagtgctgggattacaggcatgagccaccgcgcccggcctgtactatccttatttacaagatgtaaagagaaagactgggctgggctcagtggatcacgcctgtaatcccagcagtttgggaggccaagcgggggcggattgcctgaggtcaggagttcgagaccagcctggccaatatggcgaaactccatctctactaaaaaatacaaaaattagctgggtgtggtggtgtgtgcctgtaattccagctactcaggaggctgaggcaggaaaatcacttgaacccaggaggcggaggttgcagtgagccgagatcgtgccattgcactgcagcctgggtgacaagaacgaaactctgtctcaaaaaagagactgaagaagagtgaaataaggatatatatgcattagcagggcagaattgggactggtatgtgtacgttaagaggaagcatgtaaaaattgtatgtgaacataaaaaggacttcttgttttaaacagacctctccatataaataatgtggactgtcttgagtagatagcagactccatcacaagaacattccagcagaatcacaagagaatggatagtgtggccgctttctaaatggtagtttagagtgagcaaatcactgaaaagaaaggagaccaagaagatgggtgagggtgagagagatgggatggtgaaaggaaaagactgaaataaatgtttaccgagggctcaccaggtaccaagctgtgtgtctaatgccttacacatgtttttttttttttttttttttttaagatggagtcttgctctgttgcccaggctggagtgcagtgacgtgatcttggctcactgcaacctccacctccctgattcaagggattctcctgcctcagcctcctgagtagctgggattacaggcgtgcaccaccacacccaactaatttttgtgtttttagtagagacggggtttcaccatgttggtcaggctgatctcgaactcctgagctcgtgatccacctgccttggactcccaaagtgctgggattacaggcgtgaaccactgcgcctgaacaatgccttacacatcttaatttactcttttattgtcatcctctgatggagtaagagtcacctttgtgctgcaaatgagaagaagctgagggaggcgaggtgagtggtcagcatcatccagccagttcatagcagagctagtgtgtttcacctcaaagtttgtgctcttgcctatgattcagacagaaaagtgagacacagcaggaaggcaaggcaaatttttgttgtgggtgaagtttataaaaggtacctgtattaggcagaataatggcctcctgaaaatatccacatcctaatccctgggacctgtgcattttactttatttggcagaaagactttgcagataagatgaagttaagaatcttgagatgggggaattatcctggattatctgagtgggcacattataatcagaaggatccttataggtgaaagagggaggcaggagagtcagggtgaaaatgatgtagcatgaggaagactccactggccactgctggctttgaagatggaagggggccataagcaaaggaatataggtggcatcgagaagctgggtcgggcaaagaagaggatccattccttaaacctccagaaggaaacctccagaaggaacaccgccaatgccttgattttagcccagagaaatctattttggacttttgacctccagaactataagaactgggaaaaatgtatgtagtttttacattccaggaggttacagtctgctacatagtgaaaagggactggaaaaaataggccaaaatattaaacaacgattaggtctagattatgggtggaaaatagaatacaagtgatagctattttttctttcatactttatgtcttaattttcaaaggtaagaaattaaaggtaattactgtcaggcctctgagcccaagctaagtcatcatatctccagtgatctgcatgtatacatccagctggcccgaagcaactgaagaaccacaaaagtaaaaagagccagttcctgccttaactgatggcattctaccattgtgatttgtttctgccccactctaactgatcaattgaccttgtgacattctttttcttggacagtgagtctcatgatctctccaccgtgcactttgtgacctccaccactgcccacaagagaaaaccacctttaactgtaattttccactacctacccaaatcctgtaaaactgtccccccaattctccctttgctgactctcttttcagactcagcccacttgcacccaagtgcctgtatagtagactgtcttcacatggacgcgagtaacaattacattgcgatgttataaatagaagtatttcaatgtacctgttaaatcctctggacgatcactgagaaggcatatctttgagtgtaaggatgaatttgccaaggacaggagtgacgttataggcacagttttttaaaggcaggaagagagggccttatccttcaacctaaatggtccatcatttccatggatcaaactcaaaggaatgactagtcatcaaggaatgtgttcagtgacatcttatggggtaaactgagacattccaggagcctggaatcaatgtgaagtagtttcagacttggtggcaggggagaatgtgctcctaaaatctgttgtttagggctcagccttttctgcttttttcttcctattatttcttaacaatgctgaggtgggcagggccccagtcccggaacaggtcacctgtacttaataggaaggtttgtttcctttgttgaaaggggtggatatatagccctgagtttgttttttttttgtttttctttactagcaattagggaaacatagagtggctgctttctctactaacagcctcataatggagccatctaaatctcttactgattcctctaacctccagggagccacacctttacccagtcctcctagatcctgggggaatcagaggaccttgtgtaagcactatgtgaggaaacaagaaaacctaggggtaagaactcttgtaattgcctcttttttttttctttcttttaaaatattttaaacttttattttaggttcagggctccatgtacaggttttttgtttttgttttttgagacagagtctcgctctgtcgcccaggctggagtgtagtggcgcgatctctgctcactgcaacctccatctcctgagttcaagcagttctcctgcctcagcctcctgagtagctgggattacaggcgccagccaccacttccagctaatttttatatttttattagagacggggtttcaccacgttggccaggctggtctggaactcctgacctcaggcaatccgcagcctcccaaaatgctggaattacaggcgtgagttaccgtgcctggcctgcaggtttgttatacaggtaaacttgtgactcaggggtttcgtatacagactattttgtcactcgggtacttagtacccaacagtttttttttttttttttctgatcctctccctcctcccaccctccaccctcaagtaggccccagtgtctgttgttcccctctttctgtccatgtgttctcatttagcttccacttataagtgagaagacacagtatttggttttctgttcctgtattagtttgctaatctattttattaaagtatgtttccctttcacccctcctccctccccaccctaatattttagggctaagccctcatcactggacacaaagaaactggtttcttagatgctgctatgctttggttccacccaccaagacaatgggcctatttttttctataatcaaaggccctgtgtttggcccgtacagttctacgttaaactggtgccaaagctcacgccttcctgttccgttccttccaggtcatctcagaatctgcaggcttgtggggcagggtagggagtcctgagtggtgaccacagaaaggggaaagctgtgggaatccaagacagttgttcttgagagagtcttctaggcctgttggcagaagaagcagaattgtgggccaggacctgggtcctggtgttggtgactgagctctgactttgaatgagtagatttgcctatctaggccttagctgtgcctgctgcaaaatgagatttgagatgaactcaagcccttacagcttgactgctctagccatgcattttcttttctcttcctcattgaaatctatatcattccttcagggcccaaggacccatgctcagaagaaatcaatttggctaatgtccttatgagaggggaccaaccctcaggctttatgtgctctttggccttttatgcaagagtggtgagggtggatatttttgttctggtcttcttttggtgctctttgatagcaggaagggcagagtcctgacagactgtgaaagtcttgaccaccagcttaaggagtctggactcttgtgagtgtggaactaccagaggcttaaagtgggaagtgacctgtgtctcaggacacatactctaggagaagtgtggctgtgcagagtccacatgagagactcagatctgaagtgagaaatcagagggcatgaagaacaggggcataggcgtgagccatttgaggaagagttggaggtctttgtgagtgaccagaggggaggagatgggaaggaggggcctgaagatggctccgagctgtgtctagtttgggattttgggtggaccagatgtcattagccccaagataagggtggggctaggttgattaggggctgaaatgctaaacctagttttgaatgttagataagatgcctatcggccatccaggtggaactactgtgtggggagtgggaagaatacagctggcgctggagccagggagtggtagagggtgaagaggaaagagggagtgagctgggggggtctctgcctctgtagtaacttcacacctgctctcctgcgtcgagctcatggctgtgttctactctttccctctctgttctctgatcagagcaatttttcagggttttggctggatagatattattagcccaggggtcacatatttactaccaataggtcttttggaaaatggggactgtgaatcaatgaatggagaggtgaaaagaggagagtgaaggaaggacttttggagaaagataatagggaagaggaggcaggtgaaacacatgctataaaatgtgttagcattcattataaactataaaaagcacaatgcaaatgtacagttctgctgagaacactgtgaccatgggttggaagggggagaggtgagactaggagggtaaaggggaagaagtagcttagaaggatgaagccaaaagccaggctactagatctagaagtctccttggaaggctctctactgcttaaaaattacttggcctatccaatctctttggtgtaatgagttttttttttttttttttttttttttggagacagagttttgctcttgttgcccaggctggagtgcaatggcacaatcttgactcactgcaacctccacctatggggttcaagtgattcttctgcctcagcctctggaatagacgggattacaggcatgcgccaccacacccggctaattttgtatttttagtagagagggggttttgccatgttggccaggctggtcttgaactcccgacctcaggtgatccgcccgccttggcctcccaaagtgctgggattataggcatgagccactgtgcctggcctgggtgtaatgagtaatgggtcttatatgtttatatgacgatattaaatgctaatagccaacaaatattgtatgcttacaattagtacatctaacacagctagtgtaactaatattgtgtactaatagtacgatgagtggccaacaaatattgtgtgctcagtatataccaggcagtgtgctaaacactttaactagattacctcagttgatcctcacaacagcacatgcggcgggtacttttattggccccattttacagatgaggggagtgaggtatagtcatttgcccagggccttgcagcttgtatgctggagccagaatatgaagccaggccgcctgggggactatatagcatgtggtcttaatcactcagcagttcagggtagttcagtacattctgtacttttctgtttttttgtttttgttttttttgagatggagtcttgctctgtcacccaggctggagtgcagtggtgcaatctcggctcactgcagcctctgcctcccaggttcaagtgattctcctgcctcagcctcccgagtagctgggactacaggcacgcaccaccacgcccggctaatttttgtatttttagtagagacagggtttcactgtgttggccagggtggtcttgaactcctgacctcgtggtctgcccacctcagcctcccaaagtgctgggattacagacgtgagccaccgtgcctgaccttttctgtgtttttttttgtttgtttgttttcttttgtttccttttacctctgacgaagacatagataaaatgcagctcaggtacagaaagtgtcaactttcaggttgattcccagattgagagcaggaatgctgaggaaagcaacagggtaggacttctcatagagtggtccttggatcatctgtattgggatcttcgaggatgtttattaaaaactgagatctaggctgggcgtggtggctcacacctgtaatcccagcactttgggaggccgaggtgggcagatcacaaggtcaggagattgagaccatcctggctaacacggtgaaaacccgtctttactaaaaatacaaaaatcagccgggcatggcggcaggcgcctgtagtcctggctgatggggtggctgaggcaggagaatggcgtgaacccaggaggcggagcctgcagtgagccgagattgcaccactgcactccagcctgggcaacagagcgagactccatctcaaaaacaaacaaccgagatctaggccaggcgcgatggctcgtgtctgtaatcccagcactttgggaggccgaggcgggggatctcttgaggtcaggagttcaagacgagcctggccaacatggtgaaaccctgtctctactaaaaatataaaaattagctgagcatgggggtgtgcacctgtactctcagctactcaggaagatgaggtgggagaattgcttgaacccaggaggcagaggttgcagtgagccgagatcgcgccactgcactccagcctgggcaacagagtgagacggtctcaaaacaaaaacaacaacaaacaaaacaaaaaataccctgagatctatagttatcacttgggccaactgaaagaagaatttctcaaacattgatgtttgagacctactgatttaaggctgaatgtctggttctggaaggaaatggaatcttggcttcttcagtcaccacagtttgggtcttgttcctctgtaaaattaacaatgtaggccggcacggtggttcacgcctgtaatcccagcactttgggagtctgaggcgggtggatcacctgaggtcaggagtttgagaccagcctggccaacatggtggaaccccgtctctactaaaaatacaaaaattagccaggctttggtagcgcatgcctgtaatcccggctactagggaggctgaggcaggagaattgcttgaacctagtgggtagaggtagcagtgagccaagatcacgccactgcactccagcctgagcgacagagcgagactccatttcaaacaaacaaacaaacaaacaaaacccaaaacaataatgtggtccgtgctctctttctttctttgggctcttggaggggtggggtgggaggaccaagagtggataaaattgcacttgcctttataccagaggaggcactgtgaggcagcatctcttacatttacctttcatttatttttctcccccagatgggtttcacttctctctctgtcctgttggggaacttcccagctgaggacctccatgtggtttggtgctcggttgggcgatgagcattgggaggggagcagttgtagtgacttctctcgggcctgccatgctctgccatggaggtggagtgacatgaagtttagctgcttcacctcagtctgctcaagagtggggactgctgagagcagtgaatgggggacagtggaattgcagcctgggatgtgaaacggggatcctgttacctgcagctgtagtcttcacgtgtcctcatcttttgtgactcccctagggccctgagctgagcaagacagacaaacaggaggaagtattaatctttctgcttccatctcatccactagcaagtttggaaggccagtccagttatacccactgcctcgggtgaggacatcagagagttttatgcagctcagttttggggatgttcacacactctggcctcaggaagatccagaagtgagggaaaggctctgggctgggagtgaggaggccttgttctgtgtcagctaagctaccgacgttctttgttaccatgagaaagtcactcgctcactctggacgggagttttcttatctgtaagctgttggatttgagtgagatcatcttttgtgttctcaagttctgattctgtgattaacagtggtaggttgaggcaggtgtggcagagccccgaatgctgctttttctgtcacatgtgcctccctcccccaaaaggaacaagtagtgagttttatttgcatctcttcttgaatagctctgtgtttctaagggctgaagaggcccactgtgggtgtggtgaggagagtctggaggcaggagcttcctttggctctggggaaggaggcccagttggtagcttccctgccattgcacagacttcttatgttccagtaataacatgacttccctccctgttctgcctgcctctctaatattcagtttctagagtaggctatgattgttttgatagatttcccaactgtttcctgcctatgtgtctttgaagcaaatagcaggaaattcttttcatagccatcagggtctctgtttcatatttccccttttccatagaacctgacagatccagggcacagagagacacatgtgcatgttccagctcccagtattcatacagatatggtgaagggtaggtggagttagattcttacggtttggttagtattgtccggggagctcctgtaacacatgtgagattctgtgttctgtgataatgtcttgtatgtcactgctacttaagagtttaaggtgaagctttgtgagtgtattacatgtgtctggtgcatgcgtgtgggtcagaatgtggatcagtggctgctgatgtgctgatgctgagaggaagtgatttaggagctgggcttgctctctttatgtttctgctttttgtgcaatgtcctggtaacttgtcagaggctggataagatgttagaaattttcttaatccagtctgaaatctgccttgttttattcctgggtatgaatcatgtgaggggttgggaggtggaggatgaaattcccataccttctgaatagtccaaggtcagttctcagaaatcagatgttggttgtttagccatcacacccttagatttatgagttggacctagaggatttgatcgcttctgtgacagaggtatcatcctgttcccagaaaactggcgacacgttgacatgcaggaaattggtcagatttatggcttgtttctaaccaacatgtaggcgttctgccctttaaaaacaattaaatttcactgatgtttttcatgtatctaacaagggccagttgctgaattctcaaagataaataaaataagccgggcgtggtggctcacgcctgtaatcccagcactttgggaggccgaggcaggtggatcactaggtcaggagttcaagacaagcctggccaagatggtgaaaccccacttctactaaaaatacaaaaattagccggggtggtggcgggcacctgtaatcccagctacttgggaggctgaggcaggagaatcgcttgaacccaggaggcggaggttgcagtgagccgagatcgcgccactgcactccagcctgggcgacagagtgagactccatctcaaaaaaaaaaaaaaaaaaaaagataaataaaataggatctctttcctcaggaacaaacggtttgtctttttttgaacatggacttctggggctaattctcacagtacccaactgtctgtcttgcaagcctttgggagctctcagaaccagacaggctagctcagtcatgcagcagctgacacaggagagtggggtgtgagtccagccccttgccactttctgactctcccttttaggacacagtggccatgggaaggcaagacactgggctccttaagaaaggctgtggggggaatgtggtggaggtggcaactgcaattatccctcagcttgcccctcatctctccagatacaacagcatggcctcaagcacacccagaagtggagaatgagtgtatgttccctgggggaccagaaatggatttgttagttgttcttacaaactgtagtagtgagatggcagggcaatttgagccttgcggagtcatgagtcatccgtagggaactataattacttctctccattcagaccaggatgctaggcagtagttaaatggggcagggccaggcacggtggctcatggctttaatcccagcaatttgggaggctgaagtgggaggattgcttgaggccaagagtttgagactagcctggccaacttggtgaaaccttgtctctactaaaaatataaaaattaaggctgggcatggtggctcatgcctgtaatccctgtactttgggaggccgaggtgggtggatcacctgaggtcaggagtttgagaccagcctggccaacatggtgaaacccccatctctaccaaaaatacaaaaatttgctgggcgaggtggcacacgcctataatcccagctactcaggaggctgaggcaggagaattgcttgaacccgggaggaggaggttgcagggagctaaaatcttgccagtgtactccagcctgggtgacagagtgagactttgtctaaaaaaaaatatatatgtatatatatatatatttatacacacacacacacgcacacatgcacagatagatagacatagatatctatatatataggtatctatctatatataaaaattagctgggcatggtggtgcacacttgtaatcctagctactcgggaggctgaggcatgagaatcacttgaacccagcaggtggaggttgcagtgagctgagatcataccactgcactccagcctgggtaatagagtgagactccatctcaaaaaaagggagggaggggcatttgtggagaaagatgcacaagaaatgctcaggccaggcatggtggcacatgcctgtaatcccaatcctttgggaggccgaggtgggaggactccttgagcccaggaattcaagaccagtctgggcaacatagcgagaccttatctctaaaaaaaaaaaaaaaaaaaaatttaaaaatttagctgagtatggtgacacatgcctgtagtcccagctacttgagaggctgaggcaagatgatcactagagccttggtggtcgaggctgcagtgagtcatgattgccccacagcactccagcctgagtgacagagggcagagtctgtctcaaaataaaaaaataaaaaagacatactcagaccaactggtgccacatttttgtcggaggctcatacattaagctgctgtcccctccaccacacagaggcacaaaggcagtggcagctgggacttccttccctgttttctcccattcttctaattcttcatgatgcccttttgtgacttctttccccctttaatactgcttttgatatcatttcagcctgatgtcacttgtgcaaaatcactgggggtaggctgggtgaaaattttccaaaccacacattctttttttttttgggacagagtctcactctgttgcacaggctggagtaccatgtcacaatcacgactcactgcagccatgaccttttgggcttaagtgattttcctgcctcagcttccggagcagctggcgcatgcgaccacacttggctaattttttgtagagacagggtctcactttgttgcctacactggtctcaaactcctgggctcatgtgatcctcctgcatcagcctcccaaagtgctaggattatatatcagcttgagctgctgtactcagcccaaaccccacattctttttttatttttgttttttattttttgagacagggtcttgctgtatcacccaggctgaagtgcagtggtgtgaacatacctcactgcagtctcaacctcctgggctcaagcgatcctcccacctcagcctcctgggtagctgagaccacaggtgtgaggtgtgtgccaccacatgtggctaactttttaacttatttttgtagggacggggtcttgctatattgttcaggttagtctctagctcctgggctcaagtgatcctcctgcctcagcctcccatagtgctgggattataggcatgagccactgcgtctggcccaaaccccatgtttttttttttttttttgagacggattctctgtcgcctaggctgcagtgcgatggtgtgatcttggctcactgcaatctctgcctcttgggttcaagtgattctcctgcctcagcctccctagtagccaggattacaggtgcccaccaccgcacccagctaatttttgtttgtatttttagtagagacagggtttcaccatattggccaggatggtctcgaactcctgacctcagctgatccacccacttgggcctctcaaaatgctgggattataggtctgagccaccacgcctggccccaaaccccacattcttaatggcagctctgggccctacataatttcacttcttcagggtgaccctgggaacttaattctaacttgggtcctattgtagctctttaaccaccccaacagctctgtaagtatagttcagcttgagagaaagagacacagagagagaaacttcaagcactgggtgtttggtgccttgggagtcagacagactggacctggatttaaatccactttgttctctattatctgcgtgatcttggacaactgacttaagctctctagggctcaattgcgacatttgtaaaatgaagatgataccatgtaatagttataatagctactgtattgagcactttatatttattaatacagttaatccccatatatctctaggaattaggtactattgtagttgtcatttctcagataagaaaactgaggcatagagaggttaagcagcatgccaacagtaacacaattcttaagttgtggagctgggattctgaacatggaagcccaacctcagagcctgtgtccttaactactgcagtggactatagtccacagaatgttaacaaggattgaggtggggggaaaaaaacaaaaaagccccccaaaaacacaaagcatttaaagtaccaggtatagagcttggcaataagttattaaattacataactgatggcagtaaatggcagctgttgccgccagggtagaaaagcctgttttccaagctgtgtttccccatgggcacacggaggatgtggccctcagtcagggcaaggcaggagagagacgggtcttcccgctgtccagggtttgcaaggtgtcagggcttcttccactccgactctgttagacacagtttgttggcaaagtcttgtttctctaatcccaaagttgcctaacaggccccgaaaggaaaacacaggagcagggtggccataggaaagggctcccttccagtgagccagttgctcaagaatcacttttctcactgcttcagaggaatctggctttttgtatcctgctgtcttacccatttggtcagggctcctggataagctacctggggaacagagtggggcctctgcctaaattggcacaaggtgaagagtcaatgccaagaaacaaaggagaccctgcagggacctggggaaacccaaatctgggcttcaggggaagggagcatcaagcctgctctgattctttgtcatgtatactttggccctctgcctgggcttgtgaatgtcttggttagtcactgagcagttcgggtgcacctgtcccattcaagacaccaactgggttagaggcagcatggtttttggctaaatgtttttatggaagctgaggaacctgcatttcactatagctctgccactttttagttaagttgtgtgatcttgacagtttactcttttgtgagcctcacttttctcatttgagaaaattatgaagatcttttttgagacagagtctcattctgttaccaggctggagtgcagtggcttgatcacagctcactgtagcctcgtcttcctgggctcaagcaattttcccatctcagcctcccaagtagctgggactacagatgtgtgccaccatgcctggctaatttttaaatttcttgtggagatgaagtctctctatattgcccaggctcgtctgaaactgctgggctcaagcagtcctcccacctcagccacctaaagttctggaattataggcgtgagccaccgtgcctggctgaattatgaggatcaaatgacatcatgtacacaaaggccttagaacagcaacttacacattataggtgctcagtaaatgctcatagtcacaggttaggtgcagttgggagctgtggagaaatataaagtacaatctcttgcctttaaggaggttgcagtctagatggggtgagaggtaataagatagaagatcatgtaaatcacaatgttgggaatgcatgtaaaataatactggctggttgtgcgcagtggtattattgtagccaatgaggtttatccgaggtgcaattattgtgaatgggaaactttcgcaataacatcagccaacaagtgtcatggaccatgaaggctttgggagttcagagctatgagagctgccccatgggctaagccagggaaggctttctgaacaagtgagtgttgcaaacctgcaaaggttggagaggaaggtggagggacactccagaaaaagaacagaatgaggccaagtagcataagttcagaggataggaagaaaacagattggaaccaagggcttgtaggagacatgagagggaaatgagattgaataggtgggttgaggtcaggttgtaaagagctttgaatgccgtgctaaggagtttggaatttatctgaaggtttttgaggaggggaatgatgttcatattgtgaccttgatttggccatgtattcttttaatttctctggaccttagatcccttatctatacagtaagaagtttggatcatgtgattgtagaggagtttctctagctagagagtttatgattctatgatacaggaagactattttatttttgtctttatttatttatttatttttgagatggcgtcttgctctgttgcccaggctggagtgcagtggcacgatctcggggctcactgcaagctccgcctcccttgttcacgccattctcctgcctcagcctcctgagtagctgggactacaggtgcccgccaccatgcctggctaattttttttttttgtatttttagtagagacagggtttcaccgtgttagccaggatggtctcaatctcctgacctcgtgatccgcccccctcagcctcctaaagtgctgggattacaggcgtaagccaccgtgcccagccgaggacttcaatatttaaaggagaaagaacaggcaggaggaggaggaggaaagaaaaagaaaggggagggtaggcagtgaggcaaacagttacattcttgggaggctttgattagcactcagtgaattcgcattttacatgtgaaaagaaaggaatggaggggaagtcaattatgcatttatctagtgctcaatagatctacattttacataagataatgtaagactgtgaaattacagctatctgtttaggaacaaaaagaaggcagtttctgcatgactcagttcccaagcttaacttttccctttggcatagtgaatttgggatcccaagattttattttcctttcacaaactcaatacattgattaagtttaagacttcaccatgtgcctcacacatggaatccagtaaatgtttggtgctgtttattcactcattgaattccttaataagcatgtagtttcctgaatgcctgctagatactaagcactatattaggtactaagtatattaatggaaataaaaacatggtggcccttaaggagctcatagtcttttaaaggagacaagtcaaacagttacagaacagaatgacaagcatgggtcaggcacggtggctcatgcctgtaatcccagcactttgggaggctgaggcagttggatcacctgaggtcaggagtttgagactagcttggccaacatggagaaaccccatctctactaaaaatacaaaaattagccaggcatgatgatgggtgcctgtagtcccagctacttgggaggctgaggcaggagaattgcttgaactcgggaggcggaagttgcagtgagctgagatcgtgccattgtactccagcctgggcgacaagagcgagactctgtcgcaaaaaaaaaaaaaaaaaaaaaaaagaataacaagcgttatgattaaaggacaaatcaagtgttacaggagcataggggagggcttactaactcatcctgggatgagaatgctgagaacagagaaaccttttcttttcttctcttttctttctatttttaagagctaagttctgaaagaggagtagaaattgagaggagggccgtctagggagaaggaacaatacacgcaaagtctgtgatgtgagggagtgcaaagtcagtgatgtgttccgggaactgcaagtagctgagcctgttgtcacagagagtacacaggcacagtgattagaagtaatcagggaccagattacgaagagcctggtatgcttggtgaagaagtttagattttatcctcaaggtgatggagaactatacctagattttaggcagggtattgatgtaaccacccaatgggttcttcctgcctgctgtacaaataatgaccacagcattgcagtaaagaaagagtttatgcggtgggacgaaagagtttaattgacacaaggctggccacaccacatgggagatggagttgttattcaaatcaacctcatcttcagctcataggttagaggtttttatttttttcctattttattttattttattattattatactttaagttttagggtacatgtgcacaatgtgcaggtttgttacgtatgtatacgtgtgccatgttggtgtgctgcacccattaactcgtcatttagcattaggtatatctccaaatgctatccctcccccctccccccaggttagaggtttttcaaaggcagtttgggggaaggggttggagtgcttgcggctgattggtttgggtggagatgaaatcataggatcttgaagctgctctctttagcgagttgcttctggctagggccacaggagtggagttggcaggtccaggtggagctctgggtgtcagacatgcaaaaaacctgaaaagatatctcaaaaggccaatctacaacagtgatgttatgtgcaggacatatctggtgaccagtctacagcttagcagaattcaggttcctctcctccctctatcctgatggcctttcattagctttacaaaggtggttgagttttggggaaggtttcttatcatttaaactataaaccaaatgtctcccaaagttagtttagcctaagcataggaatgattaagggaaaggcaagatgggggagcatgggttagataagatctcttactgccatatttttttcactgttataatttttccaaaggcagtatcattgacattagcagacttgtgttttagggtgatctctttgactgtcaaagtggaggacagattgaatctatgagttaggggaagatgaagcccagaagcaggataagttgcgttagctgtgattgctgctttcttctctgggatgcccctttccatctttacagatcttgcctgtagtacttgccatagcaccaggcaaatagaaggcattttacatcatgtgttggttactccactgctgtggcttgtgctaacagtgactggggcactgatttgaaagtaaagtgagcaccctttttcctgtggtcacaaatcaggcaaaattgctttcttggttagaactgacgtggaagatacacacacacacacacacacacacacacacacaaatacacacacacatacaaacacacacatatattttttgaggcagtcactcaatcgcccaggttggagtgcagtggcatgatcttggctcactgcagtctccgcctcctgggttcaagcaagtcttctgccttagcctcctgagtagctgggattacaggcgtgcgccaccacgcccagctaatttttgtattttcatttgagatgaggtttcaccatgttggtcaggctggtcttgaactcctgacctcaaatgatccccctacctcagcctcccaaagtgctgagattacaggcgtgagccatcgtgcccagccagaagatatgtttggctcttctcaagatgtctccataggcattttccattttgtgaagagtctttgttccaaagttgacagtgggttcctttagggcaggaaacatatttttattcatttttgtagtccctggacttatcacaatacgtgatacatactaggcaatgatagatatttgtttcatgaatttgaaattcatgttttgtatttgaaatatgtttcatgaaatatgctgtaaatgttgattaggtgctcggattccccctcaaaagccttttaaatctagagcctaatggggtactgggcatatctaaggcctgagaaggagggaaactctaggaaatggcaggaattagcagaatggaagtaagttacttcccagaagtatttagcagttgaactgagacagttccagaaagattctgggccaaaggtttttagaaagacctactggggagattgggaagttctgaattccttttgctacctactgttatacaaatcgcttttgttcttcctcatatactttaaaatacatttggctggcacagtggctgatgcctgtaatcccaacactttggaaggccaaggtaggaagattgcttgaggccaggagtccaagagcagcctgggcaacacagcaagatctccattaaaaaattagccaggtgtggtggcatgcacctgttgtcccagctacttgggaggctgaggtgagaggatcacttgagcccagcaggtcaaggctgagtgagccatgattataccagggcactccagcctgggtgacagagtgagaccttgtttctggaaaaaaaaaaaaaaagaataaaattggcagggtgcggtggcccacacctataatcccagcatgttgggaggctaaagtgggaggatcacttgagcccaggagttctagagcaacctgagcaatgtagagagaccttgtcttttttttttttttttttcttttgagacagagtctcattctgtcactaggctggagtgcagttgtgcgatctcggctcactgcaacctccgcctcccgggttcaagcgattcttttgcctcagcctccccagtagctggaactacaggcatgcaccaccacacccagctaatttttgtatttttagtagagacagggtttcaccatgttggccaggatggtctcgatctcttgacctcgtgatctgcctgcctcggtctcccaaagtgttaggattacaggcgtgagccaccacgcctggctgagaccttgtctttacaaaaaataaacaaaattagctgggcatggtggtgcacacctatagttccagctacttgagaggctgaggtgagaagatcacttgtgagcccaggaggtcaaggcctcagtgagccaagatggtatcactgcactccagcctgggcaacagagtgagaccccatctaaataaaaataaataaataaataaataaataaataaataaataaataacagttaaactacatgacttgccatggtttcctgattctttgtctttttatgtttcctttcttcgttaggaatgttttttcctttatgccattgtcatcattcttcagtgccctgctgaaatgcttttcatgaaaccttatggaaaaaataatctctccctaccgaagtcatctcaatttttagacccccttgtggtacttaatgctctctacctagaattatatatgggttatcattcttacactagaaggaaggaatcatatgtaatttagctatgagtattccagagtgtctagcacaggtctttgtaaatgttgaatggacaatgtggctgagctgtattactaacttagtgttatgcttacttttacttgtcaacctagctggaccatgacgtgcccagggatttggtcagacattattctgggtgttttttttttttttcccccaagatggaaccttgctctgtcgcccaggctggagtgcaacggcgtgatctcggctcactgcaacctccacctcccaagttcaagcaattctcctgcctcagtctcctgagtagctgggattacaggctcatgccaccacacctggctaatttttgtatttttagtagagacggggtttctacatgttggccaggctggtcttgaactcctgacctcatgatccgcctaccttgtcctcccaaagtgctggattacaggcctgagccactgctcccggcctattctgggtatttctgtgaagatatttttgcatgagattaagatttaaattgatagattgaataaagtagattgctctccctaatatgggtgggcctcatccaatcagttgaaggcctgaatagaataaaaagatttatcctcccttgaggaaaggaattcctcctgcctgaccactttcaaactgggatattggcttcttcctgtctccagactcaaactgaatcatcacctcttgagccttgctggcctttggactgaaactatacaactggctctcttgggtctctagctttccagctcaccctgaagctcttgggacttgtcagcctccataattgtgtgagacaattctttataataaagctctttttacacacacacacacacacacatatcttgttggttctgcttctctggagaaccctactacacttgggttctaaatgttagaagtatcccagggaagggaaaagagtcctatctaccattcctggcacaggattaacatgaggcacactttaaaaatgatgcttacctttgatatcttttcatctcttgcaccctttttttgaactcttctccctcttctaagatttaaggtatataggactttgatgctacccttatccctctactttaatatctgatccaggcctatcttcttcctcatttatggcccaaatttccttttggcccaaatttcctttgcttttgagtcattttcccaatcctaccccattcccattaaagctcccaactcagtgtgttagatggaagctgggtggtaagggaaaagcagtttgtacaagtgattcatgtatagctgaaagctctgtaatcttctcagagtcatttgctaaatgaattggatgaaataccatgtagtttaataaagtgggatgaaaattttaggcagagtgggggtaaaatcttcgagtaactgcccaatgggagttactcaaccctacctggagtcagtcctagggttagcattcctgtgcgcttactgctttgacagattcttcccttttccatctttgaaaccagtttcaccaggggcggtggctcacgcctgtaatcctagcactttgggaggctgaggagggcggatcacctgtggtagggaattcgagaccagcctgaccaatatggagaaacctcgtctctactaaaaatatgaaattagctgggcgtggtggtacatacctgcaatcccagctactcaggaggctgaggcaggagaatcacttgaacccgggaggcagaggttgcggtgagtggagatcgcaccattgcactccagcctgggcaacaagagactcttgtctcaaaaaaaaaaaaaaaaaaagaaaaaaaaagaaaccacagtttctcccaaaacattaacaaacaagcactcccacagaagtagcaatggagattctactgctagcataggaagagagaaagaaggaaaccattagcagtctccactggatttttctaagttagcaactatttatagttttgaaagtcctattttagaagaatatgatttgtttaaaagatgatgagcaaatcagtagttttatattatatgtggtcataagcagagaaaagacctggttataggagagcagattttaatgcggtatggaggcattatgtttgaaatgttgataaatcaaatctgtcgtgaagctggtctggcttaaaatacttaggatctgtcttatcttcagctagctcttcccttccagattttgaaaccagcgcaattgtcccacaggactaatgtttacaggtttttttaataaacatagaaattgaccttccctagtcttagaactctaaacttgtatctgtctcatctgagttccttccttaggaaacctaccctcaggcaaggaactgaaacccatcagatcctcacacccagacaacgagataccagactcctcatccatcgtgactgcttccctacccctccctaatttctgttttcccaccttccctgctatataaactccccagtttcagtctgtcagagattgatctgagactttatctcctgttgaccttcactgcagcaccagattcaagccctccttcctggaaatacttgttgactcagtgactggcattctgtgcagcaaaccgcaggactaggctgaatgcttggtatttcagtaataatttcctgtgagaaggaaggaagtagttagaagaaagagcatgatcgtaataggaaactaaaaactgtgcatctatttcaatatttcaatatttaaatatatttaagcctgtcttatattaaaaaatcccctttttgaactctacttctcttactggcttctaccgtatcactctcttctttttttagaagcaaacatttatttatttatgcttattatttttttttgagacagtatctcgctctgttgcccaggctggagtgcagtgttgcaatctcggtttaccgcaacctcctaccgagttcaagcaattctcctgcctcagcctctcaagtacctgggactacaggcatgtaccaccacgcccggctaatttttgtatttttagtagagacggggtttcaccatattggccacgctggtcttaaactcctgacctcaggtgatctgctctcctcggcctcccagattgctgggattacaggcttgagccaccgtgcctggcctaaactaatacttaaaaagagtttatagttactatctccatttacttatctcccatctactcctgagcatcctagagtagatttattcccgttgtgcaaccaaaactactcttaccagtgtcgccaatgatgacacagttgcaaaatagaatgaccctttcacccttgttttacttggcgttgcagcccacttaccacagtccgccagtgctttgctttggaactgctgctctggccctcacactgttgggttctcttctacctcttcgcccgttccttttgagttttccttaccaccttctctgatgtgtccattccattccttaaatgtcattggtctgtagggttctgtcctaatgtcctcttctctttctatatactcatgttccctctgtgacttcagttataattgatacctgatgaatggcccatctctctctctctctctttttttttttttttgagatggtgtcttgctctgttgccccggctggaatgcagtggtgtgatctcggctcactgcaacctctgcctcctgggttcatgccattctcctgcctcagcctcccgagtagctgggactacaggtgcccaccaccacgcctggctaattttttgtatttttagtagagacggggtttcactgtgttagccaggatggtctcaatctcctgaccttgtgatctgcccgcctcgccctcccaaagtgctgggattacaggcgtgagccatcacgccggccatctctctctctctttaaacagagatggggtcttactctttcgcccaggatagaatgcagtggtgcgatcatagctcactataacttttaactcctggactcaagcaatccttccactttagcatcccaaagtgctgggatacaggtgtgagccactgtaaccagctaattttttttttttttttttgagacagagtctcgctctgttgcccaggctggaatgcagtggcgcaatctcagctcactgcaagctctgccttccgggttcactccattctcctgcctcagcctcccgagtagctgggactacaggtgcccgccaccacgcccagctaatttttttgtatttttagtagagatggggtttcaccgtgttagccaggatggtctccatctcctgacctcgtgatccgcccacctcggcctcccaaagtgctgggattacaggtgtgagccaccgtgcctggccaactgtgcccagctaattaaaaactttttttttttttttttggtagagacagggtcttgctatgttgaacaggctgatcttgaactcctctggcttcgagctattcagctacctaagcctttcaaagggctggggttacaggtgtgagcgactgtgcctgtcctccatctctctcgttctctctctctctctttttttttttttttttttttttttttttgagacagagtctccctctgtcgcccaggctggagtgcagtgacatgatctctgctcactgaaacctctccctcccgggttcaagcgattctcctgcctcagcctcccaggtagctgagattacaggtgcccaccaccacacctggctagtttttgtatttttagtagagacagcgtttcgccttgttggccaggctggtctcaaactactgacctcaagtgatccgcctgccttggcctcccaaagtgctggaattacaggtgtgagccactgcacccagccctccatctctctggaattgtatatctcaacagtttattggacatctgcttttgaatatgcaacatgtccaaaaaaactgaacttatcttgcctctaaacttgattgtttaaaacaaaattttagccaggtgcagcagctcacacctgtaatcccagcacttttgggaggctgaggcgggaggattgcttgagtccaggagtttgtgaccaagcaaagagtaagaccccatctccatttaaagagagacagagatggctgggcgcgatggctcatgcctgtgacctgggcaacataatgagacttcatgtcttaaaaaaaaaaaattagctcggcgtggtggcatgtgcctatagtaccaggtactcaggaggtcgggattgcttgagccccggaggttgagtctgcagtgaactgtgatcacatgactgcactgtagcctaggtgacagagtgagaccctgtctcaaaaaattaaaaaaaaaaatttcagtggatggtaccccacaaagatccacaccggaaatctggccaccatctttgattactcttttatcacccccacatctagtcgatcactcagtcttgacaatactacctgctaaatatctctcaagctgtccacttctttttccaaccttactcacactactgattcagccatttccttttctagatcactgcagcagccttctctctgattccacttttttgtcttcagtctaattccatgccactctaattcattttctgcagtgtgggtgaagtggatgtatgaaacaaaattctaatcacattttccctaatattaaagccctttaaatggttctctgttgccctcaggatgcactttgatctcttcaatagggcccccaagctttttttgttgttgttatattacaaatttaaaagaactcagtcttctccagcttcatctgtgctaatcctgcccccacctttcccccattcttgtactccaggtacacaacacatactttaattccttaaatacccctgttctctattgtatctgggcctttgcagttattctgtctgcctagaatgctcctgttacgcctctttcttatcaactttagttatctttggtttagacatcccttcttctgtgctatgctatgctaacaccccaaccccaggtcatgcttctgaagtacccagtacttacccctgtgtagcgcttaccatgccctctcaagattacctggtgaatgtattgtaagcattttgtatgcagggactacatgtctcactattgaatcctgggtcctagaaaagtagctatcacataatagatgctcagtaaatacacatcgttactttggctatgtttgccattaaatcaattaaacaagtggtacaaagctggtagggaatgaccaaaaatggggtcctaggcttcaatgttaggtttttttttttaaaagtaaagtcaaagttcagattattgcagttttacaggttggctatgggtcttaatgggcttatgggatattacaactgaatctaaactctgtccagctggtacagtctttatccaggcttcagtgttcttttttttcttaaaaaaaaaaaagctttattgagatataatttatatgccataccactcacccatttaaagtatattcctcaatgattttttcccagagcaagagtggaagtttattttattttattttatttttatttatttatttttttttaaaaatggccatgcatctgctctttaatgttttcctatgatgtattaaaataaaaacaaagtttcagtctcttcacaagaagtaatttatattctctgaattttttcagccacaacaactggattctcttttctgatttttgctgcagcttctgctttgtaatcatacggacagttgtgcttgtcagagttaacggtgaagtccacaaaacaaatttccacatcggcagtcaaacctgtaagaccaactttctttctgcacatgaaacatctgtttttctttggtttgggcaattcaggagctttttctttactctgagaagtactgggctgaaaaactgatgggctgggctgagtgacaactggctctcacacctctgttttcggggtagttattttgtcctctgttgaaatgctcatttctgtcatttgctgagttacaggcaaggcagccgcaggcacatttcttgatttttcagatgtgctgccagcagcaccttcacagttgtttaagctagtgtctgctctctgtacagatgcagaatctgaggtaggactgttggaaccactagctgtccccattgggctcattctgccactattctgctgcctctgaagatgttctttgtagcaaactgaacacattccatttgtcctaggatttccataaaagccacatcctgtgctacacagcatgggccccggggtctggttagtctcctgagccatatttttctgccaggtctgagttccaaccatccccatggccaaagggattttattttatttttaagatggagtcttgctcttgtcgtccagggtggagtgcaatggtgtgatttcggctcacggcaacctctgcctcctgggttcaaacgattctcctgccgcaacctcctgagcagctgggattacaggcgcctgccaccatgcccagctaattttttttttttgtatttttaatagagatgaggtttcaccatgttggccaggctggtctccaactcctgacctcaggtgatccacccacctcggcttcccaaagtgcttgggattacaggtgtaagccaccgcgcctggctggaagtttatttttaaaagtctttagaaaataaaaaaagagaaagtatgcttggaagacacccaagtgcgtgacttgaagaacaagtgcctgatttttagtatagtcacagaattgtgtaactgtcaccataatcaatcttcagaacatattcatcaccccagcaagaaaccccatacccattagtaattgctccttttttcaccccacccttcagcctcctctctccagcccctgggaaccctaatctacttctttgtttctgtgaacttgcctattctcaatatttcatatgaatggaataatatgtgttcttgtgactggcttctttcacttagcataatgttttcaaactttatccatgttgtatcatgtatcaatactttatttctttttattttttacttaaaatttttttcctatacagatgaagtctcactgtattacccaggctggtctcaaacaactgggctcaagcgatcctcccaccttggcctttcaaattgttgggattataggtgtgagccactgtgcccagccccgtttctttttattgccaaataatcttccattatatgtatataccacgttttgtaaatccattcatcagttggtggacatttgagttgtttctgcttttggctattacaaacaatgctgcttatgaacattttctttctttctaagagatggagtgttgctcggatcactgaaacctccgtctttccagttcaaatgattctcctggcccagccttctgagtagctgggattacaggtgcacacaactacacccagctaatattggtatttttagtagagacgcagtttcaccatgttggccaggctggtcttgaactcctgagctcaagtgatctgcccacctcagcctcccaaagtgctgggattacaggggtgagccatcaagcccagccgtggacatctgtgtatgagtttttgtatagacatgtttttatttctcttgggtatatacctaggagtgcaattgttgggtcatattattaccagaatggggtcctgatcaagtccccaagagagggttcttggatcttacacaggaaagaagtcagggtaagtctatagagtaaagtgaaagcaagtttattagagaagaaacaaaagaatggctggtccataggcagagcagccctgagggctgctggttggatatttttgtggttatttcttgattatatgctacatatggggtggattattcatgagttttccaggaaaggggtggcgatttcttggaactgagggttccttttcctttttgaccatttagggtaacttctagacattgccatggtatttgtaaactgtcgtggcactggtgggagtgtcttctagcatggttacacattataattagtgtataaagagcaatgaggacaaccagaagtcagttccatctgtatcttggtttgggcgtgttttggccagcttctttactgcatcctgttttatcagcagggtctttgtgacctgtatcttgtgctgacctcctatctcatcctgcaactaagaatgcctaatctgggaatgcagcccagcaggtctcagctttattttacccagaccctgttcaagatgcagttgctctggttcaaacacttctgacatatttcccccctcctttttacaaggggatctttaatcctaagggttgcagaggggcaaagatccatccactgtaacttctttaggctgactaggggcaatgatattcctgcctattagggtctcttgtatccagggtagagaggagctcagtcagaaagcctcagtatggtgagggcccgtcataactctgagttctgacaaaaggtgatatctgaaagactaataagtgctcaatttaagaaaacattgaataagcttttcttgcatttttacacaaagaatatgacagcaatatattccacaaaagtaaagcgaaataagtaaaattattccaagtgaactaaataagaaagcttttcatgaacggggcagttgttggaaccaagctgatacagtcactagctgattccaatacatgcccagaattaaaatattgatccagatttttacattaccttccccttttgtttcttctgagcagcagccagagatcactggttggttcacaggaagaagcagagtcagtctaaattgcagaaaaaactcaacagatgagactagaatctaataacaggtgtatcacggtttttgaaaaataatttttctctcattcccatttttattaaaaacaaatcatggtaggactcatttatttgcaaactaagttttagtcttattatactaggtctgattatttgtataaagtgcagcaagagtaattatttgccatataggctctttttaaattggatttgatggaactttgttccataaggaatctcagattagagcttttaaagcactgatcctagccacgggtttgtaccttcaaatactcgtatgaattgggtacatttctttcctctcaatttcccaggataattgggactcctgggccagaaagtgacatttttggccaggtgtggtcgtcacacctgtaaccccagcacttttggaggctgaggtgggttgattacttgacgtcaggagtttgagaccagcctggctaacatggtgaaaagcctgtctctactaataatacaaaaaaaatttagcctggcatagtggcacatgcctataatcccagctgctcggaggctgagttaggagaatcacttgaacgtgggaggcggaggttgcagtaagccaagatcatatcactgcactccagcctgggtgacagagtgaaacactctctcaaaaaaaaaaaaaaaaaaaaagtgacattctttagaaagtgacattctttacttaccacaggtcaggatcgctgtacaaggactgcatagacaaggcacgaggccagttttcccagggggctttttctgactctgtaagtcaactttgattccttaaaagtagtctttttgtacctggcatgccattccagtcaaagccttcataaaagaaccattgtctccaatggtgtcctgttacgaaagaaaacagattgttattgtacttgtgcaaatattgccatagtcaagaatacttacagtttccaaattttggagaaagaaatatgctccaaattttctttataggaatatattttacttgttaaaagctgtaaatagctcaaaagaaaagtattcttgactctgaaaagacagaaaggatcagcaatgttttaggcaaaaagtcataaaaagattattttcatcttttgttagttcagtctatgcaattagttcctgtttcactcaacatttatgtacacattagttttccaagagagtctttgaagttctttcttctctattttaatggcacactttccaaagttatcaaaggcctgcatttaagagtactcatcagagtcctatagctgattataaactgctctttaaagaggatcaaaataagacaacaattgtctgtggatgacaaaaattattatggcagtcatggttacttctgtggcatacaacaattttacaaaacaattataattattactgataatatacactaagtcatatcagtattataggagtatagcataattttggaaaacataccaataacacatttatacaaatacacccaaagaaagccaaacactgtttcatatttgacagtgcttcctgtatgattttaatataccaaataagccaaatatgtctcttttggactttagggtacctgatatctaaaggattaatcaggtcagaaaaaggcaacttataatttgattttggaaagttttcaaatattaaagttttaaaatacttgatataaaatagaatcccagcacactgtaagtcattgagccaaaatgataaagattttaaaaagggaaaaacctggccgggcatggtggctcacgcctgtaatcccagcactttgggaggctgaggtgggcggatcataaggtcaggagtttgagaccagcctggccaatatggtgaaaccccgtctcactaaaaatacaaaaaattagccaggcgtggtggtgcacgcctgtaatcccagctactcgggaggctgaggcaggagaattgcttgaacccgggaggcggaggtttcagtgagccaagattgttccactgcactccagcctgggtgacagagtgagactctacctgaaaaaaaaaaaaaaaaaaaaaaagggggggaaaacctttactcattgatagagggaagacttagctttccaaataattttctcttttctttcattctttttcctgtagtttattcaaaaggcaaacaaaaatctttcattaaaaaaaattacacaaaaatcttgttcaagagtgaaagccaagtctcacctttatgttagtgtactatattgatgttaaatccagttcttaataaaacctaatagacaaatctgttcaggtgcaatggctcatgcctgtaatcctaacactttgggaggctgaggcaggagaatcacttgagcccaggagttcaagaccagcctgggcaacacagtgagaccctgtctcttaaaaaaaaaaaaaaaatcttttttttttttttttttttttgagatggagtcttactctgtcaccaggctggagtgcagtggtgtgatcttggctcactgcaatttccacctcccaggttcatgccattcccctgcctcagcctcccgagtagctgggattacaggtgtgcatcgccacacccagctaatttttgtatttttagtagagacaggatttcaccatgttggccaggatggtcttgatctcctgaccttatgatccacccgccttggcctcccacagtgctgggattacaggcgtgagccaccgtgcctggccaaaaaaaaaaatcttatacacaaatctgcctaatcttaatcgttttatcataaggttagattcttataaaccttttataactctttacagtttttttttggttaaagaatagaaccatgctctaagaaagccatgttatgcttttattccaatgttcaatttacagataaattgaataatacccctttaattttagccagtatattctcatacagaatttcttttacaacactaatctttcataaacctttcacaacttactcaaacatcagctttatcctatcctttaactctctaaattagggaaaaaaacacatccccatactttcttataatcttttaccaaaaacacattctactttccttatataccttgcatgtaaaactgtttctctagtagtctcaattacatatgttacaatgttaactcttagcaacttttatttttggtgaaagacctggtaagtaagcaattttatttatgtgccaggtgtgtagcctaggacaccagacagaaatgcagataaggtctgactatttccaacatagttgggggcatggataactccatatgtccccaggccttacctagaatctagctacaaagcaggtaagttgtacaagtatcaaaagtcaaagaagtagtttataaccttaaaccgtctagcaaagatagtatttgacctacctaatttagactaaatgtcttaagttttgaagatgtttttattttaccaataatcttgaaaagtgtctttatttcataaagattactaaagtcatgtgaactaaaaggcattaaagtttttatttttctgacaaaatatttgatttcagcacttttcttaaagccaattaattggagctttttatataaataccacacacacaacacatataaatacacagacaagaaaaacaaaaacaagaacaaaaaacaaaacttagatacacagacagaagcagaaccaatagttgtaagatttttcatttgccagtttttaagtttttctttcccattttatgaaccctatcatgacttacacagaccatctagactttctaacttgtcttacatttccctttttcctaaataatcagtcattctactttaggacaaggatttaccatacaagatcttttctcacataatatttcttttctttataactttccttaccaaaaatacatcttcatatccataactttcttcacacctctctcccctactgtttttttctctttctaccttttttctattttcttctgtcccctgtcctaattgtcagctaagcaatactaaattacatttccaaagggccaactcttagatgaaacaaaatagagaattcatgttttattcaaaccaaggaaaagtggtgtgaataacagttcagttaagacagccagggccaggcgtggtggcttatgcctgtaatcccagcactttgggaggccaagttgggtggattacctgaggtcaggagtttgtgatcagcctggccaacatggtgaaacccagtctctaataaaaaaatacaaaattagctggacatgatggcgggtgcctgtaatcccagctactcgggaggctgaggcaggagaaacacttgaacctgggaggtggaggttgcagtgagccgagattgcaccattgcactccagccttggaaacaagagcaaaactctgtctcaaaaaaaaaaaaaaaaaaaaaaaaagacagctaggaaaaacatacactcttacacatggagatttctctaaggatgtaagttaagttaattactgactggctttcgggtggagccttttaaagaacaatgccagggaagcatgcggtttctagaacctaataagcagacacagctggaaggcaaaacagattccccaagaattaacggacccattttttttttttttgagatggagtctcgctctgtcgtccaggctggagtgcagtggcgcggtctcagctcactgcaagctccccttcctgggttcacaccattctcctgcctcagcctcccgagtagctgggaccacaggctcccgccaccacacccggctaattttttgtatttttagtagagacggggtttcactgtgctagccaggatggtctctaatctcctgacctcgtgatctgcccgcctcggcctcccaaagtgctgggattacaggcatgagccactgggccctgccaagggacccatttttgtactggatcctggatcccaaaaaagaggtaatcagcccatctcccatgggagacttatctctcagtgggagttgtggatgtttccataccttttaggtggctgagagcatgtttctctgatccaaacatgcaaagagctgagtatccccccataactgccattagccgtcccttaaatatatttcctacctagttattacacatggaggctaaaagctctctcataatgcaaagtaatttcttttttttcttttttgagacagagtttctctcttgttgcccaggctggagtgcaatggcgcaatcttggctcactgcaacctccgcctcccaggttcaagcaattctcctgcctcagcctcccgagtagctgggattataggcatgcaccaccatgccccgctaattttgtatttttagtagagacggggtttctccatgttgaggctggtctcaaactcctgacctcaggtgatccacctgcctcggcctcccaaagtgtggggattacaggcgtgagccactgcacccggccaatgcaaagtaatttctgataccccccaaaaatcaaaatgtcaggtaatgcagtgcaaaacagaacagagccttagattttgagaggcatctatcctcttttattttgtattttttgagacagagtcttgctctgtcacccaggctggagtgcagtggtgtaatctcagctcactgcaaactccgcctcatgagttaaagcaattctctgcctcagcctcctaagtagctgggattacaggcgcccgccaccatgctcagctaatttttgtatttttagtagagatgaggtttcagtatcttggctggtcttgaactcctgacctcgtgatcgacctgcctcagcctcccaaagtgctgggattacaggtgtgagccaccgtgcccggcctatccacttttaattgctggggttccatgaagaaaagagaagtttccccaaaatggggtctgtgtcacccctgtttttcccaaggagtcccagctgtcagaaattatcttaggtcctcttatgtgggcatgaaggtggcaagaataaaaactggagaaagagaattcagtcgtctgagaagaaaaagtttttgttttttccagaaaagtaagatccaagaaaaaaaccataaaggcctttaaaacgtatgcatcgcttggacatctgctttaaattaagccagcttttaaccaaatctcttattactagattctagttaagacaaacagccaatatttctggcttttggactttaccaaaggtaacttcccagatgaaaccaataagttttaactaaggttatgacttaactgtgggtgtaccgggtatttccaaagagttggtaagcagtttttacaagatatagaatctctaaaggtagcacagagaaaggaaaatttgagaagggaagccagaagttgttcatggatgggggcacatgttctcaggatctcctgagggttatgtcatgggcaaaaacaaacaaacaaaaagtaataaaaataaaaaataaaaaagaagttgttcatggagaggaaaggaattaataaatggtaaaggtcacacaaataaaccagaaaggacttattccccaggctggaaattgaacccaggccaccattgtgaaaagatgaaatcttagctactgagctacaacattgggcagtttctgttattcttcccagaaggagcctagagcagccaattttgaacttgctaaggcttttaactgctcaagataatttttagggctgtgacatgagcccccaaattcctgccctccagatggcagagaccaagagaaagtaccatggttacaatgtcagactcccaaggacataaaacaagatgaaggagaaacctcatccaggtttttggtttgtttgtttgttttgttttttggtttcattaaccagcagcaatttgtaactgaacagctttctggggtggcttgaacagagggcttacaggggtccttggcctgcattctatcctgtggtatctctttttatgacagaacgacacagaaagacaaattcatagcacaaattacactggatttgttacagcctaagattagcttcataaatcctttttcccagtaatgaaaactttgcagaggagataaaaagtgatttttaccatgcattcaactggtttgcgcacagagagagagaggaaagggaagggagagggagaaaagcattgcctgcagcagggcaggggaggcaaggagctcggggggccagggaaagacccacccattgcagcgacactggatcaaatgttcaggcagctgatcgtcagtcttgaagggatcttttctggtagtctcattggctctcaagtttccccctttagggagaaaaaagctccctgtgtcccacgatcctgtacatgcctaatcctatcactcatagccttcagcaaagagcgcaaggcagattaatccaaagagaatagtggttaacatcccgtagtaccaaatccatttttaaccaagaacagtgttaccaagggagacctctaactccctatgtcttaggagggactctgaccttcctaagttgagcctttaacccaagttcagacaagcgtctttgccctttactgtgatgggccttttaaccccttatgcctgcctgtctgcctgcctgcctgcctgcctgcctgcctgccttccttccttccttccttccttcctccctccctccctccctctctccctctctccccctttccctccttcctttccatcttccttcctccctccctccctccctccctcccatcttccttcctccctccctcccttccttccttccttttctcttttaatatataaaaatttttagctaatcttctgtgtatcagtccaattttagtatatgtgttgctgaagcgagcacaacccgctatgtcttagaaggtattctaaccctttcaggttgggcctctaacccaactttgtcctttacccaggataaaatgtaccccagcacttacccagagtcagccaattggtgctgcatggataattttcctttggagtcgggggtctctccagtattgtcccttcatggttctctggaagatgttatgggaaatgggccccaatccagaccccaagagagggttcttggatcttgcacaagaaagaattcagggcaagtccataaagtgaaagcaaggttattagagaagtaaagaaacaaaagaatggctactccataggtagagcagccctgagtgctgctagttggctatttttatggttattttttgatcatgtgctaaatatagggtgaattattcatgagttttccaaggaaggggcagggatttctcagaactgagggctcctctttttttttagaccatatagggtaacttccagacattgccatggcatttgcaaactgccatggtgctggggggagtgtcttctagcatgctaatacattataattagtgtataatgagcagtgagagcaaccagaggtcagtttcatcgctatgttggttttggtgggttttgaccaccttctttactgcatcctgttttatcagcaggggatttgtgacctgtatcttgtgttgaccttctagctcatcctgcagctaagaatgcctaacctcctgggaatgcagcccagcagatctcagcctcattttacccagccccagttcaatatggagttgctctggttcgaacacctctgacagtatggagggtttacaattcttaagaagagagaagttgctgagctttagagaataagctgaaacatgcatgaagcactaataactcttgccctgtactttgttactttagtgataaattttacagctggttctttgaataatttatattaattaagtttctctgtctgatgtgaagtagccagtgaataagcaaagcctaattctccaataaagataataaagcccttcttgagttaaatggaagtgggagaatgtcatgtctgtttctgtccatttccattcctgctccttctcctctggacgaaacagggctggctgatggaattaaccaggaaggcttcaaatggggaaattggctcatttaaactcctgctagtattaaactgttcctcagtcctatgtaagttaagacaaaaaagttatgaaactcatgtgagttataggtataggattctgttaacaagtatatcatatccagataaatatgggcaccttaaaagtagttgtcctgggaataaatacacatctattcaaaaaattctgtcatcattactcaaaatattttggtcaacttgccatgtagagttactttcaaaaccagtctgaggcctacaagaaaatcagtttcacttccttataatcacacttaggatttcagatacttgctagtctgtttatgtttattggccttttttaaatagttacccctttttatttctctagccccaagcaaggaaagctctgggttcacatagtgctccaagtacaggacaaggctcacatcatacagagcctaagcaatgaagaaagattggcatgcttcacaagactttgacctttaaacaaagcatggtcagtctgttttctccagtgtcctgtttctgctttgtgatcccctcccccactctttttgtattaaagaacccttaaacctgaggctggggacatggccttgaattgtcctctcagaggaaactgggagaatgggtagagcgaggtacttcagaggtctctttttccttctgctcgtgggtagttagttaatgatctaccagcagtccccactcttggggagactgggatcatgttccagccgcacatcacagcttagggcagagggcactttgtacacagagggagctgcatctgactttcctacttcatctgtagagtcagtagccatctgtagtcttgcatgttctcagttttcaggctccggatatgaaaatggatctttcaattttctttctctctgactctgctctgagggaaaatgaggacgtttactagcagaggaaaaagaaatactgaagtttgcaaaaattgatagaaagctgggctccctgctcatcatgcctccttcctccctagcagtttctaaaccctcagaacattacagtgagattttagctgatggtacaaacatgtctacaggatttcctcaagctggggctacattagaaggctttatactttggccatctgacctgcttttctcttttccagagtattctacttttcacaaataggtatgatctaggagttcagcctccctcacccttcactaattgcagaataagcaatgcagaggctgttcagagagtatcttatctgtggggagagggagaggaagcactggaacacttgccaggggagggaccagagggcataattataaatgaacaaccctggagcagaataggggatgagttagacacaggaaggaagctaaaggaagccagagaatttcaggaattgagggtatcacatggagaaataaagagcgagttagacagaggctgttggtggtccctaccctgacacctgaaagaactcctgatcaaggcctactatgggcatagtcttaggctaggttttagggataaagagataaataagacacagtccttattttacaagtttacagtctaacaaaaaggagataaattaacaaattggaggagatttttcagaatgtgtggtattgtgggctaggagtctgctaccattgctaatagctggcatttattttttacccaccgtcttctaagcattttatgcattaaataactcatcaactcctgacatcggccccttgaagtatatattactattgctataatccttgttttataggtaaagaatctgaggcacagaggcattacacatagcctgcctgaggtctcacagcaggcactcagaagcagaactccagcacaggtagtctggttctagaacctacgctcacactaacatagctgctaataagtcatgtggggaagctctgccacttcatgtctacatgcctttgtacccgcttgtctttccttggcctgagatactcttccttaaagcctctggtcaacgagggactcttctttgatatcttctctgactccttctgcctatcccagagccattgctgcccttggagcttacccaacactttgtcattgtattctatttgttggaatgtctgactccttttattataagcttctggagagcaaggaatttttattctcggaaaacagttataaaagtagagccaataatataatgagtttacatgtacttatcatccagcttcagtgatgaacatttcagttcaatcttagctcatctatattcccccttccaaccatgaattattttgtagaaaatcatagacatcaaatcatttcatctgtagatatttcaacttactcctaaaatacaagggcattttaagaaacagtatcacaagcatatcagaaaacattatcacagtaaaagattatttcctccttggctgggcgcggtggctcacacctgtaatcccagcactttgggaggccaaggcaggtgaatcacaaggtcaggagatcgagaccatcctggctagcacagtgaaaccccgtctctactaaaaatacaaaaaaattagccgggtgtggtggtgggaggctgaggcaggagaatggtgtgaacctgggaggtggagcttgcagtgagcggagatcacgccactgcactccagcctgggtgacagagcgagactccatctcaaaaaaaaaaaaaaaaaaaaaaaaagattatttcctccttaatatcataaaatatccagccaatgatcaaatttctgcaattaccttataattgttcttcctttccgtttttcatttatttgttctttgattccttcctttgttctttccctccctcctcttcttttttaaatagtaagattgtttgaaccagaatccaaatcagaaggactttattttttaatgttcatattctctttaatacctagcttagtatttgacatatagtaagtcctcaataaatgtttgttaaacaaataatcagaaacctagaaaaggtcctgtttgatatttggttggtttcttggaatgcctttcaatttctgataaccttagtttttcaggggttaactttggtgctagctattgtcagtgtatgaacattgccagaggtttgagggcaatgggtatatccttgactcagacatttctaggctaggaggaaatgggggtccttttttttttttttttttttttttgctttgagacagagtctcatgctgtcacccaggttgcagtgcagtggcatgaccttggctcactgcaacctctaccttccaagttcaagtgattcttgcgccccagcctcccaagtagctgggattacaggcacgcaccaccatacccagctaattttttgtatttttagtagagacggggtttcaccatgttgccaaggctggtcttgaactcctggcctcaggtgatccgcctgcctcggcctcccaaagtgttgggattacaggtgtgagccactgcgcctggcctggtccttgctttcttgtttctgttttttgtccttggtctctgtcatgggctgaattgtgttcccttaaaattcttctgttgaaaccctaacccctggtgtctcagaatgtgactttatttggaaataggggctttaaaggtgattaagataatgcctgtagggtgggccctaattgattctgactgctgtccttgaagaggaaattgggacacaatgagagacaccacagatgtgtaggtacagagaagagaccatgtgaggagacagcaagaaggcacctccaaaactatgagaaattaatttctgttgtttaagcaattcaggctttctggtactcagccatatagtcatatggcagccatatagtgttatagcagactaataacagtatcttactgcacgttaaattgtcgctcactcctgtaatcccagcacttgtttaggccgaggcaggaagattgcttctgttcagaagttcaagaacagcctgggcaacacagtgagaccctgtctctacaacaaataaaaatattagccccatgtggtggtatgcgcttgtggtcccacctattcaggaggctgagcctgggaatcgcctgagtctgggaggtcaagactgcaattagccatgattgtgccactacactccagcctgggcaacatagtgagatcctgtctcaaaaaataaaagttgggggccaggcacagtggctgacacctataatcccagcactctgggaggccaaggtaggtggatcacttgaggccaggagtttgagaccagcctgaccaacatggcaaaaccccatctctactaaaaagaatacaaaaattagcctggtgtggtagcatgcacctgtaatcccagctactcaggaggctgaggcacgagaatcacttgagcccaggataccgaggttgcattgggctgagattgtgccactatactccagcttgggtgacagagtgagactgtctcaaaaaaaaacaaaacaaaaagttggattgatcatttttggcttctttgccacttcctcagaacaggattgtaaaggagtttccagaaagcaccagtggctttatgtgtgcttggtacacagaattctaagatggcccctaatacctagaactatgaatatgatgagaaaccacacccacgattatgttaccttgtgtggcaaacaggattttgaagacataattaaggttacaacttagttgattttgaattaatcagaagggaaatgatctgagtggacctaatgtaatcacatgagctttttaaaagcaaaatcagagctttttctcaggctggtctcagaagggaaaatcagagatagtagaagtgtgagagggatttgacttgagagaggttctccatggctaagatggaggaggtcacagtgctaggacctgaaaaggtcttctaggagctaataatagtccctggccgacaacaggacagtggggaactcaaactgacttcaaggaactgaattctgcaaactaatgagtaagtgttgttttaagccactaaattagtggcggtttattgtatagcaatagaacatgaatacaggtgctttgtacctgatagattgaattagtggctcctttccttagtttatatttaaaacttgaagtaaaattaaaatacattgaaatgtctatagatctcaagtatacaagttgatttttggtaaatgtgtatacccatgcaatcactacctgaattgagatgtagaacatttccatcagccccagagctcccttgagcatctttgtcattaatcccaccctctagggcgaattctgtttttttttttttgagagagagtctcgctcctctgtcacccaggctggagtgcaatggctcgatctcggctcactgcaagctctgcctcctgggttcatctcattctcctgcctcagcctcacgattagctgggactacaggcagttgtcaacacgcccggctaattttttgtattttttagtagagacggggtttcaccgtgttagcaggatggtctagatctcctgactttgtgatccgcctgcctcggcctcccaaagtgctgggattacaggtgtgagccatcgcgcctggcctagggcgaattcttaacatctttaattggaattgcctattctggagcttcatttaaatggcatcatataggctgggcataatggctcatgcttgtaattccagcactttgggagggccgaggcgggaagatcacttgcctccaggagttcaagaccagtctgggcaacatagcgagacctcctctctataaaaaataaaaaattagccgggtgtggtggtggcatgcatctgtagtcccagctactgaggaggttgaagtgggaggattacttgagcctgggaggtcaaggctgcagtaagccgtgatcgtgccactacactcggcctgggtgacagagtgagaccccctctgaaaaagaacaatgacattatatagcatgcactcctttgtgtctggcttcttttgcatggtataatgttttcaagatttatcttttttttttttgagatgcagtcttgctctgtcaccaggttggagtgcagtggtgtgatctcggctcactgcaacctctgcctcccgggttcaagcgattctcctgcttcagcctcccaagaagctgggactacaggcgcgcaccaccatgcccagctaatttttgtattttttgtacagacagggtttcaccatgttggccaggatggtctcgatctcttgacctcatgatccacctgcctcggcctcccaaagtgctgggattacaggcgtgagccaccacgcgtccttacagggagggtctcattctgttgtgcaggccggagtgccatagtatgatcatagctcactgcagctttgaactcctggtctcaagcagatccttccaccttggcctcctaaagtgctgagattgaaggtatgagccatgctgccagcccatccattttgttttgtctgtagattgtaccctttgattgctgattagtatactatggtatggatattccgtaatttgtttatccattcatctgctgatagacatttgggtttccagtttttggctattatgaataatactgctatgagcattcatgtacaactgtttgtgtggatatgtattttcatttctcttgggtaaatatctatgagtaggattgctggattgtaaaagtgtatattgaactttataagaaagtgtcaactgttttctagagtgggtgtgccattttatatttcccctagcaatacataagaataccaatcattccccatcctcacttggtatggtcaaatcttttaaagttcagccagttgccaacaatttcttcttgagtacctctctgtgctttgcagaatagattattcatctcatgcccatcatatagtatgtccttccaactctttttataatttaattcctacctgtgcttcaggacactgtttcctaacacggaataaatgtgagaatcacttgggagtgtttcagaatacacaagcccaggtctcactacaggcatattgtatcagcttttccagggatggtatatatacttacgtatgttgaaaacgttccctaggtaattctgatgcatacccctagctaaaaaccattgatttagccccaggtcttacctattagctccatcctggctatatgttagtagtgtctgggaaggcttaaaaattacaaagcctgggccgggcgctgtggctcatgcctgtaattccagcactttgggaggctgagccgggtggataacaaggtcaggagattgagaccatcctggctaacacagtgaaaccctgtctctactaaaaatacaaaaaattagctgggtgtggtggcaggcgcctgtagtcccagctactcaggaggctgaggcaggagaattgtttgaacctgggaggcagagcctgcagtgagctgagatcatgccgctgcactccagtctgggcaacagagtgagacttgtctcaaaaaaaaaaaaaaaaaaaaaaaaaaagtttacaaagcctggatccctctccagaccaattatgttggaatttgtgggtggagtctgagcatcagttgttcttttaaaaaattccccagttattccagcgtgcagccacatttcccattagatttctcttgacttcttgtggcatttacgcctttctttttcggtattatgattatttttcaggtcttatctcctgtcttgggctttatattccttggggtagggaccttgcctttttcatttctgtatctttcatgaacacatgaattggtcatcaggaagagattctcagccacacataggttgtgtcctgggtctcaggttcacatgttaatgctacagtctttgttctccacaaggtcagaggttgcttgcgatgaaggatgtgggtaactccacagtgcagctggtagatggaggtcaccctgtttggtatgtttttaggtgtagccttggaactaagaattctgtgtgtggggtggaggggcagggatatgtagggagagagatctaattaggatggaggaattatacaaggaagtagtgataaaggaaggaagaaacttcttttttttcttttttttgagatggagtctggctctgtcatccagggtagagtgcaatagcatgatctcggctcactgcaacctgtgcctcccaggttcaagtgattctcctgcctcagcctccagagtagctgggattacaggcgcccaccaccacacccagtgaatttttgtatttttagtagagacagaatttcaccatgttggccaggctggtctcgaactcctgacctcaagtgatacacccacgttggcctcccaaagtgctgggattacaggcatgagccaccgcactcggtcagaaacatcttctctttagaagaagtttgaacttatctaataggccagagtaggccactgtagatttttgaataggggagtgtactaggagggtaatgaggcagtcatatgcaagaaagatttcggagagactggagacaagaagtcaagcaagactttgagtgttgttgagggtctgggtcagttaggtttatgggaatggtgagaacagcataactgacagttgttaaaaaaggatcaagaggctttcacaatgtattgaatctggaaacaaatgagcaggggctgtggaaacttagggggtgtcactgggagaaatgagtgagctgtgtgggagagcttgtttaaatgggtaacttcagacagtatttggatgtgggtgtcatgagttctggaagtagttggggctagagatataaattaagagccatctccagagaggtcactaagctgatgaaagagggtagatggagggagacaagaagggtctgagtactaaatctggtgtgggggagcagtcgtaagtgggaaatggagggaggagagctttccagaagggaaaagttgtctgtcatcttagatattgtaaaaggaaaaagtgtgaggtccctaaaaatgcctttggatttggccaagacatggatactgattttgtgctgttcccagcgatcttgggtagggaggcactgcagagggccaggaaaaattaggtgatgaggaaaggcaaagacaacacatgtgtttcaattgcttggaagtgaaggaaatgaggttatagcttagtacttagcagaattaataaatgaaggctattcgggttagaagagatccgaccctcctagagggcagaataaaggaattgggaaccaggaagagttagaaggtctagagggatttctatgtgaatgaacctgtggagacccttgtatagctacatctgattcactggagccgctggtgtgggaagtgttgttggcccctaatgaagaggctgggaggtcttttactcatgagatcatcttccctcccagaggaagataggcacttcctcccaggcaagttggagctgtggtctgttgctcccagatatactcactttgttagcaggtatgcaaatgaatttagctaattctctgatcactagatcaaatatctgtaggcttaaaaatagtttcacggccgggcgcagtggctcacgcctgtaattccagcactttgggaggccaaggcgggcggactgcctgaggtcaggagtttgagaccagtctggccaatataatgaaaccccgtctctactaaaaatacaaaaaaattagctgggcatggtggcatgcacctgtaatcccagctacttggggaggctggggcaggggaattgcttgaaccagggaagtggaggttgcagtgagcggagattgcgccactgcactccagcctgggcgacacagtgagactctgtctcaaaaaaaaaaaaaaaagagttttactctgactccccattgaacaatttgtttattctgcctgtagagaaaaacattgtccaaggtagtatcaaccatgaggcagcatgtcgatgtctgatatattatttttattataaaaacatagaataattttcatacataattcagacatgatcttagccaggaaaaattaaataacacagcacagcatggatgagggaaagtatgcacagtccgtgtcagggttagaaaaccctgaaagaggtacctgagtatagagaactccaagctaatcctcctggagaaagcctcttaggcctaacatgagatcaggtaagcaatatagaataaaacctttctcttagccccaaagagattccatctgtgtagaagactgggtgagaagtacatttgcctgtcttcctcctgtccttcctttttattataagatacatttatagaccccatagaagaaaagataaatttcagaggctgttaaaagaggctaggcctaagttataatcctcctcctcacagccccatttccccaaggggcattagcaccagtgcagctttctagctgtaaacaatgccaccagcatgagtgatagtgtccctgtagggtgctcccacttctcaaggaccaaatacaccttagcagaggccaaggtttcctgacaaagtgaatgggggcaaacagaaaatgcacaggtgcaaacatggaatagaatggtagttgatgattggtctgaggtgcctagaaactgagttaaatctagctctagccatgaatgaagaaaaccttttcttattttctatttggagcctctgacaaaaaaaatcttgagaggctcctgaccaagggacctgagggatttcggtggtttctttcacctaaggcaatcggattggctgacatagctaagctaagtaaaaataacccttttcacataaataagcagttacaaaaattaaaatggtggaatgtctcagagaaaaggagaaaaatcccaataccccaaattgtgtattctttaacaataatttaaataatcgctgaagggcagctctctgattcctttcccaagttcctagcagattgtgtttatcagaagctggttccctcctgaagctataacccctccctctcagcactgccttgaacagagcccataaagatattaaaacatatatgtgcttttgcattttccatcaggaattgccttggattttggcaagtgattttcctagttgcttctagtgggttctctgaagacaggcttgccagaaggattaggtggtattctagctaagcaccaaggtgcttagaccctgatcctacaggtagacaaccctgacagtggacaaaggtgtggcatttcactattggttatatatttgattttcttgtgtttggtgagttcacacaaggctttggagaaataggagaaggcattactgcctttactttctctctctcttgtttcctggcacatgtacttaatggaaaaggacataacctcaaggctatggcaaatccgaattagagtgataggacaggactgggggtgggaaggaatgagtgctctgaacaggcaagtttaaaacaagtccaggttgggaaaaggggaagggaggggaagttctggtccctctttcccaaagtcagctttgccaaatttcaatgacaagaaggttgggtttcctacagactcccaatgtactttcatctattgacactgagagaggggcagtgaccaggcagcctggagatgcctattaggaaggaagagtaggagaaagttgtttctgtccccacccctctacccctacaggggaaaggaatctcctagtgatgagggtgagagacttgaaatacatcagcactgcagtgagcaggacaggtttcattactgcttttttacttctgaataaattatttctgtggctgttagggatggggaggctgaagttggttgtgtgggttgctgggcttcaaagttcagggtagaataagtaacttcattcatctgaaaagcacaaataatgatcagttaagtcagtgacacagggcagggcctcaccttgcctggtgtgattcagcaccacaagctgttaccattttgaaattttagctctggagaagggcttttgttgttacccattctctgcttgctgacctcctgatgaatgatcattagaagagagaaattatggtatatatgcaatgggataggataatgcagcaatgagaaccagcaaaccacaaatacatacaatatggatgagtctcacaaagcaatgttgaagaagccacatataaggatatgttttatttctcctttagataggaacaaaaccaagcaatactaatctggagcattagaagtcaggatagtggttactcctctttggagggaagtgactggtagagttttttttttttgcgacggagtctcgctctgtcgcccaggctggagtgcaatggcacgatctcggctcactgcaagctctgcctcccgggttcaagcgatgctcctgtctcagcctcccaagtagctgggattacaggcatccactaccacgcccggctaattttttgtatttttagtagaacaaggtttcactatgttggccaggctggtttagaactcctgacttctagtgatccacctgccttggcctcccagagtgctgggattacaggtgtgagccactgcacctggctggaagggtctctttttaaggggaggtcatgtagtatttcatgatttgggtgctgcttacctgggtgtgttcaacttgtgaaagttcatacattgtgaaagtataattatgatttagcacttttcagtatgtatgtttgctctattgaaaaggtaaaatgaaaacttcttttttttttgagacagagtttccctctgtcgcccaggctggagcgcaatggcgcaatcttggctcactgcaaactccacctcctgggttcacgccattctcctgcctcagcctcccaagtagctgggactacaggcgcccgccaccacagctggctaatttttttgtatttttagtagagctggggtttcaccatgttagccagaatggtctcgatctcctgaccttgtgtttcacctgccttggcctcccaaagtgctgggattacaggcatgagccactgtgcctggccataaaatgaaaaattctataaaattattattaaaaaacaggatctcagatctattaaaattgaaattatccttttgacaataagagcaggatcagactgaaggtaggggagtgagaatgattcagtgccttccttttttaggccattgtgctgggtgctctttgtaggttatctcgtttaatcccttcaacttctctttgaagtaggcagaatgcccattttacagatgacaaagctgatgatcaaagaggttaagttacttgacaagggtcacagagctactaagagtcacatccagtattcagacacaggatgggaataattccaaaatgcatgttcttgctgcaaagtagactcatgggagtgattacaaatacgtctttgttgttgcactgaggaacattaacccaaacttgatgttacattgtgtcttcatgaataatcaattctacacagaatcatttccatgagaaaataagcccatgaaaaccggctatgcttaccttgttaggtgggtcattggagtggtcctgagctggagaagcaaaagaagagttagcgatccatggaaatgcaaagctgacttcaggtgattctagctgaaggaggtggcagttggagggtggggagtttaaggatcagttaaggaatttacttccctcagagtgtatggtccagacccagcatgttagtaccagagagggggcaggggcagaaccacaggaggccacaatccacttgtgaagagttctaccagttcacaaggccttgatttttgcccagatgtgtttctcagcaacatgctccagtggcaaggaggggcattgagacttgtagcacccacagcacccacaagataaggaaagtctcaccaagggagagtgcccacatccgtaatagaggcaggaggcggaaggagtaaggctgaggaaatggctcctggaaacatgggatcttcctcaggcctgcctggcctaggcagagtgagcctctctcctcagatgtgtctcaggggactcctgtggctaggaagggtgggaagacctatgccaccttagggttgggaaatagagatcctttctgtgaaaattcagaagggagggagtggtttgggaatccaggattccctgccaggggagggcacgtggtggaacataccagttctcactggggtaagtggctttacttactgtggttggagactgagggtttgtgctctgtgagatcacgctggtcgcttgccctaaataaatatcagaaactgtgactgctattcccaagcacaggatctttgttccgtaagttaggaaggacactgtgagcaggtaattccttagagtccttgatgttcatactgcctttcttctgagggcctcgttcttcagtctaactacaatcccttctagtgtttactcttttcctgtttgctggatgttcacatttcatttcattctttatcagctgcttctgtgcctacttctatccttaaaacctttcccattttgttttccggggtagatacttttttttttttctctatttattgttcaagaggactttggttgtttttgctttctcttaggttctcttcctatgctatttctccctcctcttccaatgtggtcaacagagcacatgacttgctttctcctgctgcttctttcattttttcatttgttttccttcttagaccttgctttccctgactaggggacagaggaacatacttgagtctcttcctctagattagatggggattggaatacccatgtccaagagataatgggagacagggagcacgaagaccagggaagaggaaacctgtgggaattagtgccgagaagcaggagtttagtgggaggagtatgagatccaggcccagagacaggcaaagaattctttccctctcccaagcatggcagtcagccttggaggaaacagaacaagaggaaaggccatcatacctgccggtcttcccgaaatgcagaaaacatgccagggctactgctatcagagcaaccagggccactactccaatcacaatgccagcaatggccccaggtgagaggccattttcttgtggtagagcattatctgtcatggagagaaaagaggagaagaaatgaaagtgaaattattttacaatgggggctgggaaacaactctcagaatgaagtagtttctaattgttccttcaaggaatacagtttcgttgtgggaaggttgctggaaggtgattagctaactatatccttgcaatttttttttttcaatcaccatgtttctttttttcttttcttttttttttttgagacagagtcttgctctgtctctcaggctggagtgcagtagcatgatcttggctcactgcaacctccgcctcccaggttcaagcgattctcctgcctcaggctggactacaggcacgtgccaccacacctggctaatttctgtatttttttagtagagacggggtttcaccatattggtcagactggtcttgaactcctgacctcatgatccgcctgcctcggcctcccaaagtgcttggattataggcgtgagccactgcgcccaaccccagtcaccatgtttctaggttgatgatctctcttctgccaattccaccctggcttttctgcgctcagccatttttaaggctttgaaatatgagaaaggctgattgctattttgtatgtgattagaactttccacctttttcgtggttgcatctttttctcagtgtctcagttgtggcagttggtgcattctgaattcaccacctcttttgcatagagaactggcttcccacaggctcccagcaggggtatgaaagctagcccagttttgtgtgactgttttattctgaagtgtgaatggctggaggactccctgtcagccttgcagaaatgctcttagaactgcactgcaggccgggcgcggtggctgacgcctgtaatcccagaactttgggaggctgaggcgggtggatcacgaggtcaggagttcaagaccagcctggccaagatggtgaaaccctatctctactaaaaatacaaaatttagctgggtgcggtggcaggtgcctataatcccagctacttgagaggctgaggcaggagaatcgcttgaacccggggggcagaggtttcagtgagccgagatcacactactgcactcaagcctgggcaacagagtgagactctgtctcaaaaaacaaacaaacaaaaactgcacttcaatctaaaacttccttcctctctttctcttccacaggaatcagatctgcatcatggtctgaggttcctctcactctcgccttactttccctcacaggcattttccccaataaattatctcgtatgtttaatcccatcttcactgtatctcagtagatggaaactaacataccaggcttgagactttgctttacctccttttttccccctttcccatatttgatcatagccatgtcccagtgggtttcttgtataatgcttctccctccatatatatatatatatatatatataatatataaataataccttttgcatctatttcttcttcttctttttttttttttttttttttgaggcaggttctcactctatcacccaggctggagtgcagtggcacaatcatggctcattgtagcctcttgggatcaagtgatcctcccacctcagtctcctcagtagctgagactataagcacatgccaccacacctggctaatttttttctttcttttttttttttttgagaccgagttttgctcttgttgcctaggctagagtgcaatggcgtgatctcggctcactgcaacctctgcctcccaggttcaagcgattctcctacctcagcctcctgaattgctgggattacaggcatgcgccaccacgcctggctaattttgtatttttagtagagacggggtttctccatcctggtcaggctggtcttgaactcccgacctcaggtgacccgcctgcctcaacctcccaaagtgttgggattacaggcgtgagccaccacgcccacccacctggctaattaaaaaaaaataatttttgtagagatagggttccactatattgcctaggctggtcttggattcctgggctcaagagatcctccagcctcggcctcccaaatgttgggattacaggtgtgagccactgtgtctagcctatttcttgtttatatctgttgcaactatttggggcttaaccctcaccagtcaactcaggctggtgactaatgctatgttagctacttttgtggagtacttcctgtgtgccaggccctgtgctgctaaatgctttacatgtatcttatttgatccataaaatagtgctgtcaggtagacattatttccattttaaacatgaaaaaatggaagcttagagtggtaaaaggcttacctaaagtcagatggctagtgagaggtggatctgagatttgaccctaggactacctgatttcaaggctaatgataatagtagtagtaatagcagctaacatttatgaaacatttcctctgtgtgtggtgttttgctgaaggtttattattacattaaatctttaaaataacactatggggccaggcgtggtggctcacacctgtaatctcagcactttgggaaacagatgggaggattgcttgagcccaggagttcgagtccagcctgggtaacatggtgagattctgtctctctgaaaacaaaaataaaaataaattagccagatgtggtagtatgtactacttaggaggctaaggtgagggaattgcttgagcccaggaggttgaggctgcagtgagctgtgtttgcaccactgcactccagtctgggtgacagagtgacaccctgtctcaaaaacaaaacaaaaaccccaaacccgtgcaatactatggagcaggcattcacagtgcaattttcggttgaggaatccgaggctcagagtagttaagaatcttgtgcaagaaagaaatttataactgtaggccaggtacagtggtgtatgactgtaatcccagcaatttgggaggctgaggcaggtgtatcacttgagctcaggaatttgagaccagctgggcaagatggtgaaaccctgtctctacaaaaaattacaaaaattagccggaggtggtagtgcttgtctgtagtttcagctacccaggaggctgaagcaggaggattgcttgaacccgggaagttgaggctgtggtgagccatgatcagcctcggtgacagagtgagaacctgtctcaaaccgaaaaaaaaaagttgttcttcaaaaaagatcactataattgacaactgttaattagattgactaagaaagaaagaagattcaaattactaaagtcagaaatgaaagtaaaacattactactaattctgcagaaataataaggattataagagtactatgagtaattgaatgccaacaaattggataacctggatgaaatgaacaaattcctagaaacacaaaacctgccatgatagaatcatgaataaatagaaaatctgaatagacctataaccagtaatgaaaatgagtcgataaaagcatttgacaaaattcaacattctttcatgctaaaaaacactgaaactaggaatagaaggaaattctcaacataataaatgctacatgtgaaaacccccagctaccatcatagtcaatggtgaaagattgaaaacttttcctttaagatcaagaacaagacaaggatgcctgcttttgccatttctattcaatgtagtattggaagacctagacagaacaattaggcaagaaaaaaaaagcatctagattggaaagaagtaaaattatacctgtttgcagaatacactaacttatatatagaaaaccctagagattccacaaaaaaactgttagaataataaatttagcaaagtggcaggatacaaaatccacatgcaaaaatcagttgtatttttgtatactaataacaattcaaaggaaaattaagaaaaaaattctatttataagagctttaaaaatacttagaaataaacttaaccaaagaggtgaaagatttgtaccctgaaaatacaaaacattgccaaaagaaattaaataagacataaattgaaaagacaccccattttcatggattagaagacttaatattgttaagatgacagtactacccaaagtgatctacagattcagtgcaatctctatcaaaattccagtaatattttttgcagaaatagaaaaattcattctaaaatttatatagactctgaagggaccatggatagccaaagcaatcttgaaaaagaacaaagttgaagggctcacacttcctggtttcaaaattttttacaaagctatggtaatcatcacacctgtaatcttagcactttgggaggtggaggcgggtggattgcttgagctcaggagtttgagaccagccttggcaacatggtgaaacgccatctctacaaagaaaagcaaaaaaacaaaacaaaacaaaaaaacccaaacaacaacaataaaacaaacaaacaaaatccaaaagctacagtaatcaaaacagtatggtactggcaaaaagaaatagaaaccagtggaataaaatatagagcccagaaagaaatgtttgcatacatagccaaatgttttttgacaagggtgccaagatcattcagtggggaaaggatagtcttttcaacaaatggcattgaagaaactggatatccatgcaaaagaatgaaattgaacctttatgtaacaccatatataaaaattaattcaaaatgcataaaagacctaaatgtaagagctaaaactataaagctcttggaagatagagtgaaaactttggaacattgaatttggcaatgatttcttggctatgacactaaaagcataggcaacgaaagaagaagtagagaaattggacttaatgaaaattaaaagcttttgtgtatcaaagcacattatcacaaaagtgaaaagacttcttatagaatgggagaaaatatttgagaatcatatatctgataagggattaatatccaaaatatataaagaactactgcaactcaaccaaaaatccccaaacaacctaattaaaacatgggcaaaggacttgaataaacatttctccaaagaagataaatggcaaataagcacatgaaaagatgctaaatattgctaatcattagggaagtgcaaatcaaaactccaatgatataccaccttataaccattaggatggccattataaaaaacaaaacaaaaccagaaagcaacaaatgtttttgaagatgtagagaaattggaactctagtgcattgctggtgggaatgtgaaatggtatagccactgtggaaaatggtatgatggttcttcaaaattaaacaggattaccatttgatccagcaattccacttctgagtatctatttaaaagaactgaaagcagggatttgaacagatatttgtatacccatgtttgtaatagcattattcataatagccaaaaggtggaagcaacctaactgtccatagatggatgagtggataagcaaaatgtgatgtatctatctacacagcataatattattcagtctccaaaaggaatgaaattctgatacattctacaacatagatggagcttgaagacattgtgctaaatgaagtaagccagacacaaaaggacaaatattgcatgcttccatctgtatgagaggtacttagaatagttaaatacggggtgggcagagtggctcattcctgtaatcccagcactttgggaggccgaggctgagaccaggagattgagaccagcctgggcaacacagtgaaaccccaactctacaaaaaaacttaaaaacttagccaggcatggtggtgcaacctgtagtcccagctactctggaggctgaggtggcaggattgcttgaacccaggggattgaggcgggagtgagctttgatcacaccacagcactccagcctgggtgacagagtgagaccctgtctcaaaacaacaaaacaaacaaaaaaacccaaccaaccaaaaaaaaccaactaagtatatgtatatttgattcagagcctgagctctttttttttttttttttttgagacagagtcttgctctgttgcctagactggagtgcagtggcaccatctcggctcactgaaagctccgcctcccaggttcacgccattctcccgcctcagcctcccgagtagctgggactacaggcgcccgccaccatgcccggctaatttttttttgtatttttagtagacacggggtttcaccatattagccaggatggtctcgatctcctgccctcgtgatccgcccgccttggcctcccaaactgctgggattacaggcgtgagccactgtgcccggcctgagctgagctcttaaccactttgcaattctgtttgctataatggtctcttcattgatattctgcctcctgtgagttttatccattttgcacaccattgacagagtaatcctagagggacatataggaaggggtgaggagtcacttacagtttacgttcagcatgatggggtcgctttggttcttactgattgggttgaagacctcacaccaatacgtcccagcatcctccctcttgacagggtttatgctgagggtggtgttgccctgggacagcttcatcctctccgaggacgggagactctggtttttgaagaaccaacggatggagattccagtgtcatttgtggagcaggtcaggttcacagagtccttatctcctgtgactgtggtcttgctggctttgatttggggctttgctactactggacttagctctgtggacaagcagagtatctgagataacctactgagaatagggttggggcctggggcctagggctatgctcctttccctgagattttagccagctctcaggtcccacagtgagctgtgcaaaggtcaccaaccaggggatagccctgaccctctgcagaaggtcgagtgtctttgttcaggtgatgaattgtaaggagagggctgcacctccctcctgaccccagatcgtctcagagtgaccctctggatatctctatatctccacttggaatcttcttctcagcgcacagaccgagcaacctcatcatcaggtagaatgtttttcccactgactttttttttttttttttcagacggagtctcgctctgtcacccaggccggaatgcagtggcatgatctcagctcactgcaagctctgcctcccgggttcaagccattctcctgcctcagcctcccgagtagctgggactaaaggcatgtgccaccatgcccagctaattttttgtatttttagtagagacggggtttcaccatgttagccaggatggtcttgatctcctgacctcatgatccacccgcctcagcctcccaaagtgctgggattacaggcgtgagccactgtgcctggcctcccactgaccctttcctggagctgtgatcaggcatccttcctgtgactgtcactttacatacaaaagggaaggtagtgttttttttcattaaataattttttagggaatgatgatgccccatccagtcttcatgaccttactatctggagttccaatccgaaggatttcccactgtaaagaggagttttacttcctggtctgtggatagaatatcacggtgaaggagattcctagagtaggcacagtgttaacaaaaggctgatattcttaccttctctacaaatacacgctgtttggcattgcccattctctccaatgcagagcccctgtggctgaatctcccgatttctccaagtgtgggtcactcgctgtgctctgtgctatcccatgtgctgtgcccacagcctcatacagctggtgacttcagagccaggacaagctcagggaggcagcctgacccaggggaggctcaggtgttgactgcctttatttatttatttatttagtttttgagacagagtctctctgtgttgtccaggctggagtgcagtggtgccatctcggctcattgcaacctctgcctcccaggttcaagtgattcttgtgcctcagcctccctagtggcatgcctagtggcatgtgcaaccatgcctggctaaatttttttttttgtatttttagtagagatggagttttgccatgttggtcaggctggtctcgaactcctgacctcaggtgatcctctcacctcggccttccaaagtactgggatcacaggcatgaaccacagcgcccagccattgactgccatcttgatttagctggattcatgacaggccacctggacaccttctgcacacacctgcgtcctaccccacatggggtcagggcagagccaatcaccgggcaagccgggagtagagcagggagcagagtctgagctgctcatccctgatgaagggcatttccttctctcatttagggaaaactattgtgagtctgttttaaaacctcacatattccttatatctcatggaataggtaaaagaaggccaagaagttacagaaagggacatgttagtgacagaagcaaattgaccttgaggaccctttctgcttccccctctgtgaagcccctcctgctacacggggctttctggggctgagagaaccccctccccacattccaggctggacctaaggtcagctgtgagaaatcagaaaaacaaagggaagagagtctgcacagatgaattgagagggttcaggggagaatttggacttgtttgtgcctgttggatacaggctgcaaaagaaaatttcttctctgctcctatttgaaaaccagaaagcttgtaccccagatcttagtgttgatgctccaggaattacttaccagtgactatgatcgtcttgactgtggtcctgttgcagccagtgactgagttattggcgtggcaggtataggatccactattattcacagtgatgttagggataaagagctcttgtgtgctttgctggaatgttccattgataagccaggagtactgtgcaggtgggttagaggctgcatagcaggagaggctgaggtttgcccctggacggtaataggtgtctgaaggggaaatggtgggggtgtccgggccatctggagcaaagagaataaagccacaggtgatgtcatcagagggaaggggaagctgctggtctggagaagggccacagtgttcctctctactaagtcacaaccctgaagtcctaaccaaacctccattgtgtccactgagtctgggtctgagacattcacctgtttctcccatcacaggctgtggaccctgagcctcccaggacaggagcagcctctcccctcctattcttggttcaggctggggctgcccaggtttgcctggggaaaggaagtcatggccagcctgggtgtccagggttaagggtctgcgtccttagacctgagagggactgagaggcctggcctctggctgcgtggatttgggctggcagcctgggccacagaggaacagaagatactcacaggtgacattcaaggtgactgggtcactgcggttcgcactcactgggttctgtatttcacactcatagggtcctgtgtcattccttgtgacactgagtagagtgagggtcctgttgccattggacagctgcagcctgggactgaccgggaggctctgattgtttatccaccacaggtaggttgtgtcctgagtctcaggttcacaggtgaaggccacagcatccttgtcctccacagggttggagttgttgctggagatggagggcttgggcagctccgctatgcagaaaacagagagaagattgccctgtgtggcacctttgattcctccacaggcatttttcttttcttatttatttattttttttggagatggagcctcgctctgtcacccaggctggagtgcaatggcacgatctcggctcactgcaacctccacctcctggattcaagcaattctcctgcctcagcttcctgagtagctgggattacaggcacatgccaccatgcctgacggggtttcaccgtgttgcccaggctggtctcaaactcctgagctctggcaatccgcccgattcggcctctcaaagtgctgggattacaggcctgagccaccgtgcctggctgggcatttttctttctttctttttttttttgagacagagtctcgctttgttgctgaggctggggtgcagtggcacgatcttggctcactgcaacctcttcctcccgggttcaagcgattctcctgcctcagcctcctgagtagctgggactacaggtgcatgccaccatgcccggctagttttttgtattttagccaggatggtcactgttagccaggatggtctcgacctcctgacctcgtgatctgcccgcctcggcctcccaaagtgctgggattccgtccgggcatttttcaatcagagttggcatctccccacctctcagccaacccaagtccctaaaagcccatggcaagtgtgtgtttcacaagacagatgtgcaatgatctgagggctcagagaccgtgaggccgcctgctctgtgtgagagaagcacagactttctcaagtgtgaactgagcagcagtgttgggtcgtggacagaccgaggactgggagtcacagccccaggcacttctggtccttccctgactggctgatgcctgcctgacccacctgtgggtcctcacctggaacatacaggtgctgggtcccttccagcttcacagtcctactttgccccactaggtgtgttttctctgcagcttccctgtctgaggacatcctagagatgggtgatgatgggacttcctattgtccttaaaccctgaggatactgagcagcctggcctgggactgtatgtttcagcagaaataacaggggacaccaggggcaagcctgaaggtagctcagtcgtcaggcagcagaaccacaaggtggggcagtttttcccaggtgtttgatgatgactgacttgagccagtgaccccctaaagatagagcagagtccaaggaatgatctagaaaagagtgagggtgacaggcaggggctgcctggatttaacagcatatctacgttccttgtctttggtctttaatgtcccttttccccctgaaaagagcagatgatgacactgtggatcttttctgaaatatgtgggttttttgcaaatgcagaataaccagctagtggaacggaaggagcatgaacttgctgaaagcctgaccctcatggaccgtgtgtgtttggtagatctgggatataaatttgagaagttaaattattccatttgtgaaaattgttattaatactctggatctaacaccaattaataagaggaatattctctagagagcgtgataaactcttaaaccaagctctgaagtccagtaggatcatgttatgatcaaagaaagatgctgaagtcagtttgaaatcagtgactccctgggtagaagggactcatgggtcctgttaggaagacagaacttgtcagaaaggatatctgagagttctcaattgcattaagagagaaacgatgccatatgaggagaagtgatgtatgttatgttagtaaatttagaaagagttctatgttacaaattcctgtggaaattcaggtaaaaagaggaacccaaaacagtcatgtgaaatgctttcttccttttctctcaacctcaggaaacacaactagagtttgaccaaattcatccaaattgggcagagtctaagtgagacaccagtggctaatgcatctccctgtctgagagatcccaccttatgacaatggtgtcatcatgaggacacaggtgtaggtggaatgggcagcaaacccatcagacagcacctgcctggctagctctacctggggaaggtcccaggaaccactagaggatgtgagcccacagcagaacagggatggagttaggagtcaaatgggtgaaatgagcccatgggctttggggactgcagacctgtccttctgcctctgatcccctggtgagtcagtatagagagtgtatggaggagtcgctcgtccctgtcccctggcctgttccacatgtcagcctcactgagggacgtggggacagtggcttatgatggacctggcaggggtggctgctctgggctcatttctgtgcctttcctattgcctgggaggtgggcctggccacagtgtgagcgggaagggaacaggacagtcaaccttgttagacggagtgtctgggaaaggcctaagggtggaggaaactgtgcagttcagctgggataaaaggagaggaaaatgaggacatggaggagcagagagagtcagagatgcccatgacagtgagcagtgggggctaagtgaccttagagaccccagcaaccaggagcctctggtgtcccagaaccaagaccagggagccctgaaaaccttcccacagccgagcagccccagagtcacatgaaatatggtacttggggtggctttaggggtagatggtcaggggatggaacatgggtctcagtctctggagggatggggagcaggtatggcaagaacctcccaggattctgcaaccagatccagtctctaaagaggttatggatcattcaatcattcattcattcgtgagagaactactgagtgtgtgtttcatattgggccctggctggtgcagggtgtgagtgaggagagaaagcaaagtcctttcctttatcctcctgtgggagtgacaccaacacatcaggaaacacaggatttcaagtccagggagcagaggtgtgggtctgaggggataggcctgaacattttttttttttttttttgagatagagtctcactctgtctcccaggctggagcacagtgacatgatcttggctcactgcaacctctgcctcctgggttcaagcgattctaccacctcagcatcccaagtagctgggattagaggcacgcaccaccatgcccgactaattttttttgtatttttagtagagatggggtttcaccatgttggccaggctggtcttgaactcctgacctcaagtgatccgcccaccttggcatcccaaagtgctgggattacaggtgtgagccaccacacctgacccaggcctgaacatttctgacactgactctaattgttgaataagttccagaataaaacttggttaattctccatttgatctcactccccagaccaggatctcccctctgggctgcagatgcctaagaagaaaggaactgaaccaactctggtattggggtccacagatgccaaataaggcccctggagtagaggagaggttaagactgtggctgaagacaaatctcctgtaactgatcttccagttacggtctgtgtgaccttgatatagtgactgtatttattgccatgtggctcagtttcccctcagtgaaatagtataaatggttaatggttttggcttatcttgtggtctgtgaattaaccttaaaatatttataattatttgacctcagctctgcataggggagctgcccaaataaacaatcttattttattttatttttttgagatggagtctcgctctgtcacccaggctagggtgcagtggtgtgatcttggctcactgcaacctctgcctcccaggttcaagcaattctcctgcctcagcctcctgagtagctgggattacaggcacgcaccaccatgcccggctaatttttttgtatttttagtagagacggcatttcaccatgttggtcaggctggtcttgaactcctgacctcatagtccatccacctcggcctcccaaagtactgggattacaggcgtgagccaccgctcccggccgcagcatctattgttgttggattccctgagagtgcctctcagcctgatccctggtggacaaggagctttcaggagcatcctgtctcctctgttcctcctcctggggatggtaaacttcctatggcatctcctaagcccccagggcagttggctgatggcctggggagcttgtccatctgtcctctccaggctgagactaaggtgaaggatgaggctccatccttgcccaaatgaggctctagtgcctgaaccctggctggttaccagctccaggagccacagccctcggatagctcaaattcttgttcctagtcagccctgcccaggaggccacaatctagccctggcccaggctcctcagggtcaccaggagttgagaaccttgggatagtgttttggagcaggggattcccagggctgagcttgtctgtgaggatcccagaaggcccttcaggccagaccctgactgagtcctactgggtctttcttagggacatgttcaccaggagggtcccggggggctagattgagactggtctcccctcgataagttacccacatcagattgtccttcctctgaagcaaatgtctgcaggatcaggactccagagtaagacattcggtattttgatgtctgtcccatagtgtgtcctgcactagatgctcaaaccttaacatggggtataatgcagaggaggacacaggcacagcccaggcctgacaatcccatgtgtgggaagtagaactaaccccccaacacccagaggtcatggggaaatactcacggtatacatggaactgtccagttgcttcttcattcacaagatctgactttatgacttgtagggtgtagaatcctgtgtcattctgggtgacgttctggatcagcagggatgcattggggtatattgtctctcgaccgctgtttgcgggccctggggtagcttgttgagttcctattgcatatcctacaatttgacggttgccatccactctttcccctttgtaccagctgtagccaaaaagttgctggggcagattgtggacaaggagaagaacctccttcccctctgcaacattgaatggcatggattcagtagtgagctgggcagtggtgggcgggttccagaaggttagaagtgaggctaggagagaggagagagcatcagtcaatattgggacctatgcattagggtagaaaaatggggccttgggtcctgagcaggtgtcttcacccctccaccttggagtgtgtgtgtgtgtgtgtgtgtgtgtgtgtgtgtgtgtgtgtgtcctactgggtcaaggtcagcagtgtgactcccattcccttagtgcctctgaccttgtcatttctctggaatgcccttccccagggatccgcatggctccctccccactgccctcagatcttgatcacatcagggtgctcttgggagatcctttccctgacacctcccctagagaccctgggtattccctttctgacctttttctgctctgttccctccagggctcttgtcaacacctgacctcacattctagatctctttgcttgtctgtcttccccacccatgagagcgtgagctccgtgagggcagggatttgtgtgatgttggttgcaccccagtgcctgggataggctgcagactcctgtggatgagttagtgagcattcccagggctcttcatgtcctggggtttatttgccaatatctgaggttggtggctcagggctctgtttaatgccccttttaaaatgttttccttaattgtcacgctgacttaaattgtgattattgtcagcagtttttgaaatttattgctcattgatgattcagttggaaaaggtaaaaaatgggagattgtttattcactaacagtttcagatcactgagactttccttttatgatctctatccctttcatgtcctctctcctatttggctccaagagaagccctctgtcccctcttagagctccatcctccccagaggaccctagccattctctgtgcgccctctttccgccccttcccagggtgtcctcccctcacctgtgagcagaagcccctgccagggtacacgcactctgtgaagtggggctgagaggtgccccatggtgtctcctgctggccctgtcttcacctgtggaggagagcttgggctccaggaacgcttcgagcacggctgctctgtcacctctgctgttttccactctctgtgctgagcctcctccctggggcccagagctttgtctgatcatgtgtgctggggcggggtttgtccaggaagctctgtttcctctcctctcattcctacctttgtccttactttctctttcctttctgtctacattttggtttcccagaccacactttgagaatcaaggctgatgagacctctgtccccatcaggggaggaggatcccccctctccagcactgacctctattgtgtcctggctatgggtctgtcagcagcacacagagaaccctggcatatccaaatgtggtaattattttctttgcaacacagtgagctgccaggtctccccatgctcttcagtgtgctgggaaggtaggaagacacccagcaggaaggtgacagaggtggctctgggggatggaaaggggctcactgggggatgactggggagggaccagccctctgtctctagtgtcaccagcctggcctctaacccagggacagagacccaagtccaggggtctcaggtggagctgcagctcccggatatggagggggaggtgtcctgtgtgtcctgggaagagaggactgtgatagagggaggtgggtggctctgggctctactgtccttggggaagacttcagggggaccctccctcccttgagctgaggctcaaggcctgtccatgttctccctgaccatcctgggtggtctctgtcctctgcgaggctgattgtcctgtggtcaccgcaccttccccacaggtggtgccaggagggaatggggagctgcacagggacccctcacagaacagggtcctcagaggacccaggaagggacagagcaggtacatgggagggcctggaagggtgttttggagcaagggatggaaagtgggctctaccttcacctccttagcaaagccaggttcatgaccaggggaatgtttcctgagtgttgtctgtgtgcaatgtctccccctggagggcaagacaaggcctgcagccttgtcaagggctgccccagggatgctgaccagggtctacatgatgtgagctggccctgacccctgggcagatgtgggctctgacctccaggcttcaaggtcaagtcaccccaggtcctgttcactgcgggtccccaggctgcccagctccatgcggtgcaggatgagcccagggagaggacgtgagttgtccagaggacttctgtcaagattggagagaactgtccaccagggggatgggctgccttagaaggagccatctgtcccagaggtttgaaaaacaaaagcaaaaacaaaacaaaacaaaaaaacaaaggcccagtgaggtgcctttgggggcttgagaatgaaatcctgtcacatgtggcaacatgaatggaagtgggctaggaacagaaagttaaacatcacatgttcttactaatatgtggaacctaaaaacagttgatctcatggaaggaaaaagtagaacagagcataccagaggctgggaagggtagaggaagggagggacagggaaagatgtgttaaaggatataaaattacagctagataggccgggcacagtggctcatgcctgtaatcccagcactttgggaggccgaggcgggtggatcatgaggtcaagagattgagaccatcctggccaacatggtgaaaccccgtctctactaaaaatacaaaaaattagccaggtgtggtcgtgggcacctgtagtcccagctacttggaggctgaggcaggagaatcactggaacccgggaggcagaggttgcaatgagccaagattgcaccattgcacttcagtgtggcgacagagtgagactccatcttaaaaaaaaataaggccaggcgcggtggctcacgcctgtaatcccagcactttgggaggccgaggcgggtggatcatgaggtcaggagatcgagaccatcctggctaacaaggtgaaaccccgtctctactaaaaatacaaaaaattagccgggcgcggtggcgggcgcctgtagtcccagctactcgggaggctgaggcaggagaatggcgtgaacctgggaagcggagcttgcagtgagccgagattgcgccactgcagtccgcagtccggcctgggcgacagagcgagactccgtctcaaaaaaaaaaaaaaaaaaaaatacagctagataggaggaggaataagttctaatgttctataccactgtaggatgactacagatttttttttttttttgagacagggtctggagtacactgcagcctcaacctcctgcgatcaggtgatcttcctgcctcagtctcccatgtagctggaactataggtgcacgccaccacgcctggctaattttttgttttatttttcaatttttttttaaataaagagacagggtatcactatgttgcccaggctggccttgaactcctaagctcaagtgatcctccgcctaggcctcccaaagttctaggattacagccaccatgcccagccaagtgttttgatttttttgtagagactgatcttattatgttggtcaggctggtctcgagctcctgggctcaagcaatcctcccgtctcggccttccaaagtgctaagattataggtgtgacccactgcaaccggcctgactatagttaacaataatatatagttccaagtagctagaaaggggatattgaatgttcctaacacaaagaaatgctaaatgtttgagatgatggatatgctaatcaccctgaccttatcactgtaccttatatgtatcacatcgctatggacccataaatatgtacaattattaggtgtcaattaaaaaatacaattaaaaaagtcatttagagctaaatcatgatgtgaaatgttgttttcttacctctcatctcatgacaacacttggcaatggcaaaacatcctcaggagttgtggctgtgtgctttactgcacagaccagtttgtttgtgagaatgtgtcacctaatgcgagtgaacctacatgagatcatcacccttcctgggggacctcagagaagaactgagaaccgctggctcaggtgtgtggaggaggttgcaggtgagtcacttgctggaaggaaggtctgtgggccagcttgaggaggaatccatttgtagaggccactggatggggccacctgggcctgggtgaagagggcctgagggcacaggacagggggagagagaaggtggtgcacatcgtcatgcaggcaagtgctttaagtgtctcttcattcattcatggcaggcaactcacactttaacatagcaactcagcaaataaaatgaggatattgactgggcgcggtggctcatgcctgtaatcccagcactttgggaggctgaggtgggtggatcacctgaggtcaggagttcaagaccagcctggccaacatggtgaaaccccgtctctactaaaaatacaaagattagctgggcgtggtggtggacacctgtaatcccatctactctggaggctgaggcaggagaatcgcttgaacccaggaggcggaggttgcagtgaaccaagactgcgccattgcattccagcctgggtgactagagcgaaactctgtcttaaaaaaaagaaaaaaaaatattttttctacttagttcaagttcctaaaaaggtctccagattgccagatttccctggaagcaggtcagggaatggtccccattaagaactattgaaatacattaacaaaaaataaagacagatagaatagctgaaacagtcttgaaaaagaaaactggaggactcacatttctttctttcttctttttttttttgagatggagtttcactcttgttgcccaggctggagtgcaatggcacgatctcagctcaccgcaacctccgcctcccgggttcaagcggttctcctgcctcagctcccgagtagctggaattacagacatgcaccaacatgcccggctaattttttgtatttttagtagagacggggtttcttcatgttagtcaggctgatctcgaactcccgacctcaggtgatctgcctgcctcagcctcccaaagttctgggattacaggcgtgagccaccgcgcctggccaggactcacatttccttatccgaaaacttactatatggtgggtacagtgtgccttgctccagtgacgaatgcactgaaggccttgactttaccacaatgcaatatatcagaatagcaaaattggacttgtaccctatgattatgcacattttttaaaaaagaaaatttactacaaagttactgtaatctgaagagtgtggaactggcataaagatacacttacaccagtggattagatttgacagtctggaagtaaaccctcacatttacagtcagttgatctttgacaagggtgctgtggttttttaggtgtcaatttgcctggattaagagacaccctcatagctggtaaagccttgtatctgggtatgactgtcagggtgtttcccgaagagactggcattggagtcagtgaactcagtaaggaagacctgccctcactcactgtgggtgggcaccatccacttggctgagggcctggatagagcacaaaggcagagggatggtgaattctctctttctctctcctggagctgggacacccttttccttttgtctttggacattagaactccaggttgtttggcctttggccatggactgagggtacaccatggcttctttggtcagaactgagccatgctgccagcttccctggttttccagcatgtaactggctaatcatgggacttctcagcctccgtattcacacaagccaattcctctaacaaatcccctcatatatttagatctatttctatatctacaactatatctttatcccgttttctctgtctctctgaggaccccgactagtacaggtgccaagttaattgaatggaggaagaataatcttttcaaataatgatgctgggacaactggataaccacctgcaaagaaatgaaattttggaactctatttctcaccatattcaaaaattaaaacagatcaatgagttaagtataagagctaaaatcataagaaactctcagaagaaaacataaggataagtctttatcacctcagatgtggcaatggactttttagatatgacacaaaaacatgaacaacaaaaggaaaaataaactggactttatcaagatgaaagccttttgtgcatcaaaggacattatcaagaaagtgaaaagatcacccaccgaatgggagaaaaaatttgcagaccattatatgaataaggttttatgtccagaaaatataaagaactgctacaactcaataataacaaaaacccaaaaacctgattaaaaatgggcaaaggggctggatgcggtggctcacgcctgtaatcccagcactttgggaggctgaggcgggcagatcacgaggtcaggagttcaagaccatcctggcttacacggtgaaaccctgtctctactaaaaatacaaaaaattagccgggcgtggtggcaggcgcctgtagtcccagctatttgggaggctgaggcaagagaatggggtgaacccaggaggcggagcttgcagtgagccaagattgtgccactgcactccagcctgggcaacagagtgagactcgatctcaacaacaacaacaaaaatgggcaaaggactcagatggatatttgtctaaatgatatacaaatagtcaataagcacatgaaaagacacttagcatcaatagtcactagtgaaatgcaaatcaaaaccacagtaagacaccacatcacacctataacaattgctacaattcatttaaaatgttaaataagaaatgttggcaatatgtggagaagttggaatcctcatacattgctggtgggaatataaaatggcacagtcactgtgggaaacggtttggcttttccttaaaaagctgatcacagaattatcatatgaaatagcaatttcattgttaggtatatgtccaaagaattgaaaacagggactcaaacagatatttgcatgggaatgttcactgcagcattattcacaataggtaaagtgtagaaacaacccaagtgtccatcaacacatgaatggataaacaaatatggtgatacatacaacagaatgtcaatcagccttaaaatggagtgaagctctgacatatgctgcaacatagatggaccttggaaacattatgctaagtgaaataagccagaaacaaagtgacatatgtgtatgatgccatttatatgaaaaatcaagaataagtaaattcagagacagaaagtagattagagattatcaagatctgggggtagggagcaatggggaattatttttttttaatctttaatttttgtggttacatagtaggtgtatatatatatatatgaggtacatgagacattttagtacaggcatgcactgtataataataatatcatggaaaattgggtatccatcccctcaagcatttatcctttgtgttacaaacaatccaattgcattcttttagttactttaaaatgtataattaaattattgttgactataatccccttgtgctattgaatagtaggtcttattcattctttctatttttttatatccattaactatatacccacctctcccctgtcccgccactacccttcctagtttctgggaaccatccttctcttctttatctccatgagttcaattgttttgatttttagatcccacaaataagtgagaacatgtgatgtttttcttcctgttcctggtttcacttaatatgatgacccttagctccatccatatcgttgcaaatgatagaatctcattttttaatggctgaataatactctattgtgtataagtgccaccttttcttcattcattcatctgttgatggacacttaggttacgtccaaatcttggctgttgtgaacagctctgcaacaaacatgggagtacagatatctctttgatatactgattttctttcttttgggtatatacccagcagtaggattgctggattgtatggtagttctatttttagttttatgaagaatctccaaacagttcttcattgtggttgtactaatttacattcccaccaacagtgtacaagggttccctttactccatatccttgctagcatttttaattgcctgtcttttgaataaaagctattttaactggggcaagataatatctcattgtagttttgatttgcatttctctgatgatcaatgatgttcagcaccttttcatatgcctgtgtgttattcgtatgttttcttttgagaaagtctgttcagatattttgcccttcttttaattggattattagatttttttccatagagttgtttgagctccttatatattctcattattagcatttctcgttctttaagatgcatcgttaggttttaggttatttatttgaagttcttctctttcttttttgatgtaggcacttagggctataaatttccatcttggtactgctttcattgtatcccacaggttttggtatgttgtgttttcattatcatttgttttgagaaattttccaatttccttcttaatttctttgttgacccactggccgtttaggagtatatcgtttaatttccatgtgtttgtatagtttccaaaatacctcttgtttttgatttctagttttattccattgtagtcagggaagatacttgatattacttcaatttttttgaatgttttaagacttgttttgtgacctaatatatagcctatttttgagaatgatccatgtactgaggagaagaatgtgtattttgcagccattgaatgaaatgttctatagttccatttgttctatagttcagattaagtctgatgtttctttgttgattttctgtctgggagatctgtctaatgctgaaagtgaggcgttgaagtctccagctattatggtattggggtctatttctctaatatttgatttatatatttgggtgctccagttttgggtgcatatatgtttacaattgttatatcctcttgctgaattgacccttttatcattgtataatgacctcctttgtcccttctaacagtttttgtctttcagtctattttgtctgatataagtatagctactcctactctcttattggtttccgttggcatggaatatctttttccatccctttaatttcagtctatgtgtatctttatggttgaaatgtgtttcttgcaggcaacagataattgggtcttatttttcagccgttcagccatactgtatctttttttggagaatttagtccatttacattcaatgttattactgataagtagggacttactcctgtcattttgttatttgtttttctgtttttatttattgcagtcttctctttcttctttccttccttcctgtcttccttttagtgaaggtgatttcctctggtggtatactttaatttctagctttttattttttgtgcgtctgttgtatggtttttgatttgtggttactatgaggcttgcaaatactatcttaaaaccattattttaaactgatgacaacttaacactgattacataaacaaacaaacatgcaaaaagaaaactaataaaagctctacacttcaacttcgtcaccccactttttaatgttttgttgtttctgtttatgtcgtattgtactgtctgtgtcctgaaaagttaatgtagtcgtgatttttgattggttcatcatttagtctttctacataagagaagtttatacaccacaattacagtgttatactattctgtgtgcttaactattaccagtgagttttgtacctttacgtgatttcttcttcatcattaacatcctttcctttcaggttaaaggattaaatttagcatttctcataggacaggtctggtgttgatgaaatccctcagcttttgcttgggaaggtctttatttctccttcgtgtttgaaggatatttttgcctgatatactattctagggtaaaagttgttttccttcagcactttaaatatgccatacactctctcctggcctgtaaggtttccactgaaaagtctgctgccagatgtattggagctccattgtatgttgtttcttttctcttgctgcttttaggatcctttgatctttgatcttagggagtttgattgttaaacgccttgaggtagtcttctttgtgttaaatctgcttggtgttctataaccttcttgtatttgaatgttgatatctttctctagggttgggaagttctcttatattattcctttgaataaaccttatgtgcctatctttttctctacctcctctttaaggccaataactttttttttttttttcctggagatggagtcttgctctgtcaccaggctggagtgcagtggcacagtctcagctcactgcaagctccgcctcccaggttcacgccattctcctgcctcagcctcctgagtagctgggactacaggcacctgccaccacgcctggctaatttttttgtattttttaatagagacggggtttcaccgtattagccaggatggtctccatctcctgacctcgtgatccacccgcctaggcctcccaaagtgctgggattacaggcgtgagccaccgtgcctggcctaaggccaataactcttagatttgccattttgagcctattttctagatcttatagatatgcttcttttttttttttttttgtctcctctgtgttttcaaatagcctgtcttcaagctcacaaattcttctgcttgatcaattctgctattaagagactctgttgcattcttcaacatgtcaattgcatttttcaactctagaatttctgcttgaatctttttaattattttaatctctttgttaacattttaattttatttattttatagagacaaggtctcattctgttgcccaggctggtctcaaactcctgagttgaagtgatcctctggcctctgtctcccaaagtgttaggattacagacacgagccactgtgcccagcctctttgttaaatttatctgataggattctgaattccttctctgtgtcgtcttgaatttgagtttcctcaaaacaattattttgaattctctgtctgaaaggtcacatatttctctttctccaggattggttcctggtgtcttatttagcttgtttagtgaggtcgtgttttcatggatggtgttgatgcttataggtgtttgttggtgtctggtcactgaaaagttaggtatttattgtagtcttcatgtcatagtctgggcttgtttatgcctgtctttcttgggaaggctttccaggtatttgaaggcacttgggtcccaagcccaagaatgctgtggtttttgcagacttacataggtactgccttggcgatcttggataagatctggaagaattatctggattaccaggtagagactcttgttcttttcccttaatttgtttcaaacaaatggaatctctccgtttgtgcagagccacctggaactgggagtgtggtgatgcaagcactctgtggccaccaccactgggattgtgctgggtcagacctaagcaccgcactgggtcttgcccaaggcccttcccttgagggtggtgaggtctcccaagcctcagatgtgtctagaaatgctgtctgggaggcagggattggagtcaaaaactgtggctgattagccaggcatggttgtgggtgcctgtaatcccagctactcaggaagctgaggcaggagaatcgcttgaacctgggaggcagaggttgcagtgatcagagatcatgccattgcactccagcctaggcgacaagaatgagactccattgcaacaaacaaatgaataaacaaactgtggctaatctggcactcaaacaatgcaaagtccttcctgctcttccttcccctttctccagcaccaccactgttccacaggggattccacccgtcctctgctgatgttcacttaaagcccaggggttcttccatcagcttgtggtgaatgctgccaggcctgggactcactcttcagggcagtgggctcccctctggcccagggaaggtccagaaatgttctccaggaacataggcctggactcggggaccccaagagactgctggttactctatcccactgtggctgagctggtacctgaggcacaagacaaagtcccctttactttttcctctatttttctcaagtagaaggagtctctccccatggctaccacagctgggaatgcactgggtcacccctgaagccagcatgtctcagagcccaaggcccactgcatattacctgggtatcactactggttattcagggcccaggggctctttagtcagcaggtgatgagttctgccaggattgggtcctttccttcaaggcagtgggctcccttttggctcacggtgtgtctagagatgtcatctgggagctagggcctagaataagggcctcatgactctgcccagttccctgtcctgctgtggctgagctggtatccaagatgcaagacaaaatcctctttactcttctctcttctctccttaagcagaaggagggagtcactttcgttgcctctagctgcgttgcctgaggttgggggaggggtggtgaaagcattcccttagccatgccagctggtgtctcccttggttacacgccactctagtccactggctttaagcccagcctaactaggagttgccttttaagtttacctaggactccagagcacatcagcccaccgtggggaggcttgctgaaaaactgaagttccgactgctgggatgggtgatacctgtctggctagggctggtccaagtactgcctctctgtgtgggcactggctgagcccagcatgcctttattctttgctgtgatggggcagcactgaattcaatgtaaggtcctccagtggccgcactcacccttcccaaagtgcagattctctctccatgttgcagggctgctgcgggttggtgggggatgggtgaggggtggtgtggcctctctccggccctcttcagtgccttttttctttctttttgtaagacagagccttgctctgtcgcccaggctggagtgtagtggtgcaatctcagcttactgcagcctctgcctcctgggttcaagtgattctgatgcctcagcctctcgagtagctgggattatgaaagtgcgccaccacacctggctaatttttgtattttttttttttttttttttttgaggcggagtctcactctgttgcccaggctggagtgcagtggtgcaatctcggctcactacaacctccgcctcctgggttcaagcgattcttctgcctcagcctcccgagtagctgggactacagccacgtgccaccatgcccggctaatttttgtatttttaatagagatggggtttcaccatgttgcccagggtggtctcaaattcctgaccttgtgatccacccgcctcagccttccaaagtgctgggattacaggtgtgagccactgcgcccggcctaatttttgtatttttagtagagatggggtctatgtagcccaggctggtctcatgctcctgacctcaagtgatccacctgccttggcctcccacagtgctgggattacaggcatgagccactgcacctggcccaatgcctctttcagcgatatgaagttaaaaccaggtactgtgattgctcccctggttttggttcttgtgacagtgcttttctctgtgcagattaaaatgtagtgttccagtggtgtgggggtgaggggacaaatggtgtaggcgtctattctactgtctggctgtttggggtgatgaaaattttctggaaaaattagtgatgatggtggtttaacattgtgaatatagttaattccacttgtgtatttagagacagggtctcaccatgttgcccagactagactccaactcctggcctcaagcaatcctccctcctcagcctcctgagtagctggggctacaggagccctccatcagggctctgtagtaaattccatttaattgtacagtttaaaatggttaaaagatacattttttgatatgtatattttattacagttttaaataagtatttggtgaaaaaaaccccaccatataaaatacccaccctgggcaaatagtcctcaaactcatgtgcggacccctcatgacattctgtgcagagatccaatgatttagacatgagactgaccagacaactgcagatgcatgaaataaatgtactttcaaagagacagttccgctgggacctgtgggccccgcagaggggaggtcagcagccccctggaaaggccctaggctggggccctctggtggacagtgaggaaattgtagacgaaaaggtcatgccaaactggtttgtttaaaaaaaatcatcgtttgtttttaatgtgtctagacaaaatttcaacactgtcatgttccatatattttctttcgcagtgttctttgattctagctcttctctggtgtgtgtgtgtgtgttttttttttttttgagacggagtctcgctgtcgcccaggttgcagtgtagtggcgcgatctcggctcactgcaggctccgccccccggggttcacgccattctcctgcctcagcctcccgagtagtagctgggactacaggcgcccgccacctcacccggctaattttttgtatttttagtagagacggggtttcaccgtgttagccagcatggtctcgatctcctgacctcgtgatccgcccgcctcggccacccaaagtgctgggattacaggcgtgagccaccgcgcccagcctctctggtgttttaaaacaagcttacactaaactcagatgttcaaagtctgatgccctgccactttcttacttcagtgcatgtttctttttcgagacggagtctcgctctgtcgcccaggctggagtgcagtggttctatctcggctcctgcaacctccgcctcctgggttccagcgattttcctgcctcagcctcctgagtagctgggattacaggtgggtgccaccacacccagctaatttttgtatttttagtagagatggggtttcaccatgttagccagggtggtctcgaactcaggtgatccacctgtctccacctcccaaagttctgggattataggcgtgagccactgcgcccggcctcagtgcacgtttcttataattccttttaaaatctgaccattgtcatgggcatgcatcaagtctgtgaatgcagacctctgggatatgcccagtgggaatactggggactcagggaatagttatcacccaaggtaggatggcatgaggcagtatcaagggacacctgcaggggggtgggggttgtgtcccacagatggtgggagccacagatggtttcatcaggacagaggcacaataaccgcatcttgatggtctcagggcttagactcacctgttgcgtccagaaccaggcattgaccagggttcaaattagtgctccacctgcagagccctgggcagagatggacaacagcctccccctgcaggacagtcagtgcagggctgggtcacctcagcactccacaggcctttgcctgcagtgttctcctggccagggaggaggccaggcccatccctgtcacatcatctaaggggctgtctgccctgagggtctgcagaagagttgaacagagtaaggggcataggaagcagtagagccgtgtctcttcttgagctgtgttaacttttgtcttcttagtccctgaggtcactcccaaatgtgggcatctagacctgaggcaggagggtaggacggggccagcttcttggcatgtgacctgtgttatcacatgggggcctgtgcttagaagggtcctgcacttaatatagtgcccttctgtggctgtgttgaaaccctcttaatcctgtcttgaagaaggatactgcattttcaggttgcactgaatcccccacattatgtggctcttcctgggtcaggagcagggagagggagaggccatgagatgagggggaggctcagggctggatgggacccatgtcccctagggctctgtgctgcccttgtcttaggacctgcagggcggtttggtctcatctgttcactcccagtgtccactgaatggtgcttgtatagcagggactgtcccactatccaggacaagcctatagtgtgtgtgctcactcagtatgtgtgtcaggctggacagaacctcactttatccctgtctgctgtgggatctgcagcaaggatcccctcctgggagtctcggtgtctctgtacctgagtggtgggatgaggagacctcaaagggccatctcagaggggactcaacagtgttggggctggaggaggcctgggctctggggcccgaggatgtcacacacctcttgagtcttttgaaatggtttcatctgttattttgaaaatcatataggtggctgggcatagtggctcacgcctgtaatcccagcactttgggaggccgaggcgggtggatcatgaggtcaggagattgagaccatcctggttaacatggtgaaaccccatctctattaaaattacaaaaaattagccaggtatggtggcaggcgcctgtagtcccagctactcaggaggctgaggcaggagaatggcgtgaactccggaggtggagcttgcagtgagctgagatcacaccactgcactccagcctgggcaacagagggagactccatctcaaaaaaaaacaaaaaacaaacaaaaaaaaaacggtcacataagaaagcacacttattgtaaattccagcaatataagcgcttgtaaaatgatgtgtcagatccctgaccccaccccactccaattccatttccaggatgtaaccactgtttgcagttggtatgaatctttcaataatactttctcatttgtcccactcattgtttatacagccaaacattaatgaattatattattaattggtaatgttgttttatagtgaagcatgtatggtggacacttcctttctcaacacatgtggatttgctccaattgtgtttctttttctgttttagaggttttattttaggttcaggggtacatgtacaggtttattatatacataaactgcatgtcacaggggtttggtgtacagatgattttgttacccaggtattaagcctagtacccaacaggtgttttgtctgatcctctccctcctcccaccctccaccctcaagtaggccccagtgtttgttcttctctttgtgtccatgggttccaatcatttaggtcccacttaaaagtgagaacatgcggctgggcatggtggcttacgcctgtaatcccagcactttgggaggctggggggggggcggggggtggatcacgaggtcaggagttcgagaccagcctgcccagtatggtgaaaccccgtctctactaaaaatgcaaaaatgagaacatgtgatatttggttttctgttcctctgttagtttgctaaggataatggcctccagctccatccatgtttctgcaaaggaaatgacctcattcttttttgtagctgtgtagtattccatggtgtgtacgtaccacattttctttatccagtctaccattgatggacatttatgttgattccatgtctttgctattgtgaatggtgctgcaatgaacattcgtgtgcatgtgtccttatggtagaatgatttatattcctctgggtgtatacccagtaatggggttgcagggtcaaatggtacttttgtttttagctctttgaggaattgccatactgcttttcacaatcgctaaactaatttacattctcaccaacagtgtataaacgttccattttctctctctcttttttcttttttagacagtcttgctttgttgcccaggctggagtgtagtggcacagcctcagctctctgcaaactccacctcctgggttcaagtgattcttgtgcctcagcctcctaagtagctgggactacaggcgtgcaccaccacgcctggctaatttttgtattcttagtagagtcgaggtttcatcctgttgggcaggctgctcttgaactcctggcctcaagtggtcctccctccttggcttcccaaattgctgggattacaggtgtaagccaccgtgcccagcacattcctttttctctgcaacttcagcagcatctgttattttttgactttttaataatagccactctggtgtgaaacggtatcttactgtggttttgatttgcatttctctaataattagtgatgttgagcattttttcatatgcatgttggtccatatgttcaagcttttgaaaagcatctgttgatgttctttgccttttcattgctttccccttatttattttattgcatggctacactgtgatgctttatccactcgcctattggatttgacgctgtgtcccactcttcatgttgacaagacattctgcagtgactatcctcatacacatatcttttccccacgtggagtattaatccaggaactcattcattcagctcttataaagtaccctggccaggctgtgggcaggtcaagggctttaacagagacagggcaggcacagtcctgccttctcagagctcaccgctcagtgggactctcagaagtgggatagtggtcaaagcgtatgcacactgaacacaatgaggccagggctgggtgtgatggctgagttcaaacctgcaattccagagctttgggaggccaaggcaggaggttgcttgaagctaggagttgaaggctgcagtgagctatgatcatgccactgtactcctgcctaggcaacagagcgagactccatctcaaaaacctccacaagacctaaaaaatcatgggccaaagttgttgttgtaagtactgcagtcccatcaggaatatatgaaaatgtccatctccagtatccccacctttcttggaataatgattgaagtagaaagtgcccgtgttcttgtgcctacctctgcccacacaccgtcttcacttacacttagtcatccaccacttaccctttcactaagtgctattgattatgtccatgtggtggaccagatgccaggagccccaagatgtcctgagcagctccctctgctcgtccttccaagagttctggttccacaggtgacccctgtagaacctgtgattaccactgaaggctgacagtgagtggtgggtgttccaggaggggccgtcacctccatgtacagggttggggagggtggaagggagcaagtggctgatggctttggctgtaaggcaggtggacaggctgatgtgggctcctgggaagggatggagaggggaggggaggggaggggaggagagggaaggggagggaagagaagggaatgatacagaggttggaacctgccttcatggaccaagaacagcagggaggccatccaggctgcagctggggagggaagatgtggggagtagtgggtgaagggagaagcagactgtgattgatcttgggggctgggcggtgagcagaggtgtgttacgtgtctgtccctgccattgatatgaggaggggtggggctgtgggtgacacctgggtcagtgggatttcctagtgtctgctgttccccaaagcctctccatatagagggtcagtatagatctgatgctgtgtctgggggaaggggctggtggtccgaggcagcctgtggtgcttactgaccctagggatgaaaggaaagggatgaggaagcctctttacagtgaagcctcaggtatgtgaagccacaggtgtctcacctggtgactgtcatcagacatgtgccttgggtgacagtttcagggttcaggtggttgttattgttatgatgtttgcctgacaaggacccaggtatccagggatcgagagcacaagacccctggtgaggggagggtcagatgagaatgagcaggttcaagtggtcagagtgggagggattcctggagagactgaacctcaactcttcctgtcaggagctgtggctgtgtccaggagagatgacaagggtgacccaggacattgagtgagtcatcgagacattggatatgaggacagggcagagaggaccctggtgactgctcagatgtgggatgtgaggagggctctgactcatgcaagttacaggatcccccaacccctgagcccacaggtgacccttacactggggattctgagtgctgtgtgtgcccagaagggacactggattggctggacctgagtccctgaagggcagggatggtctgtagggccagagtcttctctgtgggtgtgatgtaagcaggaatgagcaagatgggggtgataaggcttggcttggaggagctggtagaggagcccaggggcttgggtcagctccgcttcccaggggctcagctggggctggaggagcaggatgctgtgctcagggtgtgctccaggcagggtgatgtgtgtggttccagggtcaggcaagagggtaaaaaattaatcatgaaaaattcccaccttttgtaggcagagacagtggcctgagtgtcaggggcagaaagatgcatcatgaggcaggagcaggcactcagcctcccagagaccacaccctgggtgcagcactcagccctgcagggagtggcaacagatgtgcctacaaccctaacgtccaggcacctgcaacaaatgtttctccctcattgcatctttctcatgtggaatagaatgggcagtgatatggtttggctgtgtccccacccaaatctcatcttgaattgtaattcccgtaatccctacatgttgtgggagggacctggtgagaggtaattgaatcatgggagtcgttcccccatgctagtctaatgatagtaagttctcatgagatctgatggttttataaagagcctccccctttggttggctctcattcttctcattgatgctgccatttgaaggacatgtttgcttccccttctgccatgactgtaagtttcctgaggccttcccagccatgctgaaggtgagtcaattaaacctatttcctttttagattacccagtctccagcagttctttatagcagcttcggaacggactaatacaggcagcttttcccgcagtctctttccatccatgtgctgcctgctgtgatgcctgggaatggggggggggggggggcgggcactgagtcactgtccagggtgctgatgtccatgaactgttgaagagctaatgagttgtgatctcccagttacttctgctttcatttattcttaacaactgagcatgtcaccaaggaaaagatagagaggtactaggggcatggagagccctctgtctctctctctcaggacctggagggtgctggggacatcactacagtcaggatgacctcatccaggtacccatgtatagtttgtagtgaatgatgatgagaaaatggccttgagaggagtgatgggcagaacaagaacctctcaaagatgtgctcatcctcatccccatatctgtgaataagtctcatggtaaaagacactttacagattaaaggaaagatcatgagatggggagtgataaggcttggctgtgtccccacccaaatctcatcttgaattcctatgtattgtgggaggggcctggcgggaggtaattgaatcatgggggcaagtctttcccatgctgttcttgtgatagtgagtgggtctcagaagatctgataggtttataagggggagtttccctgtacaaactctctttttgcctgctgccatccatgtaagacatgacttgctcctccttcccttctgccatgattttgaggcctccccagccatgtggaactgtaagtccattaaacctctttcttttgtaaattgcccagtctcaggtatgtctttatcagcagcatgaaaacagactaatatagtaaattggtaccaatagagtggggtgctgctgaaaagataccccaaaatgtggaagcaactttggaactgggtaacaggcaggggttggaacagtttggaggggtcagaaaaagacaggaaaatatgggaaagtttggaacctcctagagacttgttgaatagctttgcccaaaatgccgatagcaatatggacaataaagtccagactgaggtggtctcagatggaagtgaggaacttgttaggaactggagcaaaggtgactcttgttttgttttagcaaagagactggtggcattttgccccagccctagagatttgtggaactttgagcttgtaagagatgatttagggtatctgggggaagaaatttctttttctttttttttttttttttttgagacagagtttcactcttattgcctaggctggcatgcaatggtacgatcttggctcactgcaacctccgcctcctgggttcaagtgattctcctgcctcagcctcccgagtagctgggattacaggcatgcaccaccacacctggctaattttgtatttttagtagagatggggtttctccatgttggtcaggctggtcttgaactcctaaccttaggtgatctggccacctcggccacccaaagtgttgggattacaggcatgagccaccacacccagccttctggtggaagaaatttctaagcagtgaagcattcaagaaatgacttgggtgctgttaaaggcattcagttttataagggaagtggagcataaacatttggaaaatttgcagcctgacaatgcagtagaaaagaaaatcccattttctgaggagaaattcaagctggctgcagaaatttgcataagtaatgaggagccaaatgttaatccccaagacaatggggaaaatatcttcagggcacgtcagagttcttcacagcagcccctcccatcacaggcccagaggcttaggaggaaaaagtttcatgggttgggcccaaggtctctgtgttgtgtgcagtgtagagacttggtgccctgcatcccatctgctctagctgtggctgaaaggggccaacatagagcttgggccatgacttcagagggcgcacgccccaagccttggcagcttgcatgtggtgttgagcctatgggtgcacagaagtcaagaattggggtttcagaacctccgcctagatttcagaagaggtatggaaacgcctggatgctcagacaggagtttgctgcaggggcagggccctcatggagaacctcttctagggcagtgcagaagagaaatgtggggttggagcccccacacagagtccctactggggcaccacctagtggcactgcgagaagagggccaccgtcctccagatcccagaatggtatatccactgacagcttgtaccatgtgcctggaaaagctgcagacactcaatgccagcccatgaaagtagccaggagggaggctgtatcttgcaaagccacaggggcggagctgcccaagaccataggaacccccctcttgcatcagcatgacctggatgtgagacatggaatcaaaggagatcattttggagctttaagatttgactgccccactggatttcagactagcatggagcctatggcccattcgttttggccaatttctcccatttggaatggctgtatttacctaatgtgtgtgccccccttgtatctaggaagtaactaacttgcttttgattttgcaggttcataggcagaagggacttgccttgtctcggatgagactttgggctgtggacttttgagttaatgctgaaatgagttaagactttgggggactgtttggaaggcatgattggttttgaaatgtgaggacatgagatttgggaggggccagggtggaataatatggtttggctctgtccccacccaaatctcattttgaattaccacatgttgtgggaggtaattgaatcatgggggcaggtctttcccatgctgttcttgtgatggtgagtgggtcttatgagatctgatggttttataagggggagcttccctgaacaagctctctctttttgcctgctgccatccatgtaagacatgacttggtcctccaccttctgccatgattgtgaggcctccccagccatgtggaactgtaagtccattaaacctatttcttttgtaaattgcccagtctcaggtgtgtctttagcagcagcatgaaaatggactaatacagggagattattgtggtttatccaagatgtgtccaaaataaccacaaggcccctttcttataagtaagagagggaggcaggtgtgggtggagatgtggagacagaagcagaggacagagtggtttcaagatgctgcactgctgtctctgaagatggagaaaaaggacacaaccaaagatgtaggcaccctctaggaggtggaaaaggagaagaagcggactctgacctggagcttccagaaagcacacagccatgagggcgccttggttcatgtttttatgtcactcagcttgtggtaatttgtcatagcatcaacaagaaactaaaaaggtgtcacctttcctcatctgacggtgtgtgcaggtgggataaggggtcatttagagttaaatcctgatgcaaatcctgaggtaaatcaacccattaccagttgttttcttacctctcatctcatgatgaacagcctgtggcagtggcagaacacccttgggaaccatggctctgtgctttagtgcagggactggcttgtttgtcggaaggtgctgcccggtccaagtgaacctacatgagattgtcacccttccaggggccctcagggaagggctgagaaccgctggcccaggtgtgtggaggagctgcaggtgaggcagggctggaggggccaggtagaggagcagacaggttgtcctgtcaccatgggagcctgcatgagctttaggttggggagccctgctcctctgacctggatgctcctgtgtggaaaggaggcttgctcaatgagatccacgccagggggtaaattgggaactgatgggaaatgaggggctagagtcctgggtaatgccttggaggaccttgctcgaggactgaatttttggtctgtccccaccttgattactctgacagcccctctctgtgtcccaccaggggtaaaaatgtcctgagcagtggccactgggacagaggagaacctggtggccagggctaagcatccaggatcctggatttggggacaggcaaactcacttgtggaggacagtgatagacagggccgccagggcctgggtgaagagggcaggagggctcaggacactggaggctgtgtgggggtcacagccacgatctataccacccatgtatgctcctgcattgctcacctttgtgtggacatcagatggccccatcttccacgctcctgagaccccacatgcattcacagaggaacccaggctggggcagtgcatggccttggtccctggggtagtgggaagacagctgagtgcttggctggctgggcagggctcctgtgaatcctgccctttcctgtgtagggtccaccccagcctgactcccaaccccctactcctgtctcccaggaaagagagactggggttgagaaaaggtggagatattttccctgtgtgagctgggagagaatggacgtggagtttcaggtgagtttctgctaagttctcacgagcagaaaaagagccaatgagaggaaggttcccctttattcagatcctttccaggtgaccccgggtgggccacaggcccattcactttccctgcaagcccccacttcctgtggtgatgggaagcctttgtcctgacccacccagagcccagggcagtctgttgaggtctccatatattcagcagggactcccatccctccctgtccccaggccagtgtctcctcaggactcagagctggttctctggctcaggctccatgtccttccccatccccagggctgggagcttcggggacgctccaacaacccacaggagcagctcccagaggaacctaagaaaccacatctgctttgtggttgacccagcagtaaatgtttgtgtcatggtttagcaattcctgcaaaaaaaaaaaaaaaaaaaaaaaaagagaagaggccttgacccctgtggctttctgagaacagagtctggtgtctcccaggctctgggcccatccagggctgctctgatgctgaacctggctgtgctcagggggttcctgttcccaggccccttcctcatctgctcaccaccccctgttgtgtttgcagtttcctgaatctcagagctcagccaggtgtgggtgggggcagatcctgggtccccctggagcctgcgggaccagaacacctgtgacccacactcacctcatagatgggagcggctgtcctggggtcgggtagcggggcctgggcaggggagagaggggatgtcaggggacagagagggagagacatggaaggttcctgtctctgatcggccagaacttacttccctgggtctacttatggtcatttcccctcaggagtgaccagctctgcccttgagctcagcctcccagtgtggacacagcaccccgacccctgtcctggctgggcccaccctgcacccttgttaatgtgggcccctgactgattcttccagtgtccactctgcacctgctgcactccaggggtctcctcaggtgacggagggccccggggtggggtcagcacagggcatgggtggtcctggccatgtagggaggcctggatcctggccggaggcactcactttgacctgactgttctggggaaaggtgggtttgtgctatgctgtggggttgatggtccccctgccctgaacctgtactgctgggaccccagtagaaaggggctggggaggggatgggcttacagggtaggtggagttgtttgagggaccatggcctgggggacacagacaggagtcagcagctgggtgggaggagagcctgggcctctcatggaggagggcattggggtcctgaactcccagagagtcagggagacagggcatcttaccaggagagacccctctagccattttaggggccaagtgagcaagtgagtttgcagaggtgacccatgaccaagagcccacaggtcagggctgacctggccagttggggtcccctgcaatgacgttttatgagactcctccttgaagccccatggaaaggatcagaggacctcaggggtgactggcaggagtggacactgtgggccaggcctaggggttgccagccacacccaggctgaagggacactggggagctgctctctaaagtcatgctggccactggccctaggagaggtcaggcttatttgtgaggagtacaagattaaaagccaaactctggagttagaacaggggatgaagaggggaccctatttccaaagaggggcatggagatctcctttctccattggttctgtatcaggagctgagccaggtgaggggatcaaagactttacaaaggcacatctgtcctggccagaggggaaggaccctcagccagatgctgggccaggagaacattgacccagggatgcaggaaaggaactgagggcccagggaaggaaccagatcatgggggtttgcctgagaggaagggttaagtccccagagggaaagcagggccaggcacatgtgcaggacactgaggggaccaaaggtgtcttggattctcccagaactcagtgtccctgctgtggccagaccctgctctcagggccagtgatgctgaaatgggacaacagccttgtcttctctctctaccccttggcaagagacataaaggacattccaggacatgccatcctggcacccaggttctcttgtctcacagctcaggggctgcgggaactgcattagccatgggggcactgaccctacccagcctgtccaagctgttacatccttcaccgtgtgaccatgcccaggactccctctcagatcctgagcctgcaaatcccccctcacttggtggatggattcaataaacagcaggaggtaccggggttactgagcactccctcccccgctcccttcctccaggcagctgtggctttgctgtgtgagggaactaggaccacactcaggggtgagaccttaaccaggccgaattcacagaggaggaagctgttgaggaggcagcccagggtcagcagctggtgagggaggagctgtagaatgagagggaaggatctcttggggagggctcaaagagcctggccctgaatactggggggggtcttcttcctcctggcctggggtcagcctgggggtgggagggaggccaggaaaaagctgtagtaccttccagtcctgacgaggagcaggaaacatgccagggtggccaccggtgccaccccgaccagaaccctggtcacgatgccagtgaaggcccccacaggaaggcctggggcatttttttctgcagaaaggggaaggcaaaggggatgaagcccaagtctgttccagggggaaccatgaggggccttgcagggcaggggcttgttcagggaggaaggaaatgccacggagtttgagtgtggtctgttgtgctgtcctcatagctgactccctcgctctctgtggctgcaccattttctgtgtctcaggcttgaaacactgggatgcgccgactcctacgttctcccccaggagcctgcacctcgccctgctcctgtgcctttaaatcccttcttcctctcacttcatgcctcttaccgcttttttcttttctattttttgttttttgaaacggagtctcgctctatcgccagactggagtgcagttgtgtgatctcggctcactgcaacctccacttcccaggttaaagcgattcttctgcctcagccttctgagtaactgggatcacaggcgttcaccaccacccccagctaattttttgtattttaagcagagacggggtttcaccatgttggccaggatggtctcgatctcttgacctcttgatccacccacctcggcctcctaaagtgctaagattacaggtgtgagccaccgcacctggccttttcttcttttgtttttttagatggagtctcgtccaggctggagtagagtggcacgatctcagctcactgcaacctccatctcccgagttcagatggttctcctgtctcagcctccctcgtaactgggattacaggaatgtgccatcatgccaggctaatttttgtatttttagtagagacggagtttcaccatgttggccaggctggtctcaaactcctgacctcaggtgatccatctgcctcagcctcccaaagtgctgggattacaggcgtgagccacagcacccagtcttccctctgtttcttcttttccattccatgattgtcatacagagctagccctcgctgtcaactcaatgctgatgagcggggatgatgctctttgactgttttcgggggtcttccatgtgccaggcacagtgggcaccaacctacctacagctcatctcatcctcctatcaccttgagggaggggggcttcactcccatctgcagagttagaatctgagacttacagtgcctcagtaagtcaaggaaggtcacagaacttgtacatgatacaaccaaattttaaccaaggtctccttgacttagctaataacaaagctcataaaaataataatactagttgatagcactgattgagccctggctctgtgcactaccctgttaagggctttaattacattaatcttcaaataaacatcctcacaaccatcctgagatccaagtgtttgttaaaattctacagatgaggaaactgaggcctaggaggttgagtgtcttgcccaaggtcaaacacctggtatattcccggcactgactgtcaggcctctgagcccacgctaagccatcataacctgtgacctgcacgtatacatccagatggcctggagcaactgaagaaccacaaaagaagtgaaacagccaattcctgccttaactgatgacagtccaccgttgtgatttgttcctgccgcaccctaactaatcaattgaccttgtgacattcccccccggacaatgaatctcatgatctctccaccgtgcaccttgtgacccgccccctgcccacaagagataactacctttaactgtaattttccactacctacccaaatcctgtaaaactgtcccacccccatctccctttgctgactcctttttcagattcagcccacttgcacccaagtgaataaacagcctcgttgctcacacaaagcctgtttggtggtctcttcacacggacgtgcgtaacactgaccctgatagttgacacaagggatttagttccagataaaaactggtgaattctcctattgttcctcactcctcagatcagaatctccccctctgcactgtggatgcccaagatgaagggagatgaacccatgactggtctcaggtctgcagatgcctaataacaagcagcctcacacaaccccagtggaggagaggagggggctgtggctgcagacagacctcgcatgactctaatctgccacctatggactgtgttgttataggagttattaggaaattattttagggagatagagaggaaagggggtccttgggaagtttttctttttctttttttgagacggagtcttgctctgttgcccaggctggagtgcagtggcatggtctcggctcactgcaacctccgcctcccaggttcaagtgattctcctgcctcagcctccccagtagctgggattacaggcacgcaccaccatgcccggctaatttttgtgtgtttagtagagatggagtttcaccatgttgcccaggctggcctccaactcctgacctcaggtgatccacccacctcagcctcccaaagtgctgggattacaggcatgagccactgcttggccagtttttgtttcttttaaagcagttccagaaatgttgcttgtctagcagaaaagccccagctcttagagcctggctggcaagctttgatatacaaatgaaggccattagaaactgggtccacccaaacatggggattcctgccctcttcttgcccttgctcccatatgtgcctggcaacacggttgccctcacatatccccacgtgtgtagaaccatcaaggctccctgcatttgcatattaaaaggccagggtggagggccagtttcttcttgggctacgtgaatgacatggctggtcaaaccaatcccctgagccctgtgcaaatcagacaccacgtcctccggcctcctcatataactggctgttttctgctgcacttagggtttcctctctttgcttggaacccccctccgtctgtccctgtatgggggagctttttccttcttttttgcctattaaactctttgctccacatgtgtctgtgttgttttatctaaattggcacaagaccgaggatcctggtattgctccagtcatcagagccatatcagtgtgaccctagtcagtgactgtctccctgtgcctcattttcctttcaataaataagataaatgctatttggctacaaggttgtttatgaattaacctcaaaatgtttacaattacttgatctcagctctgcacagagcagctgcccagatgaacagcatgtatgtatttgaaatgcttgttccccagtgctgtaaagaaatagcacttgaacataaatttaattttctcagcaaggccatttttatattttctgtagaaagggtatactcgccagcaattttgtgacaagagtacaccgaacaaaggagacagggtcatttataatctgacgtgtctaccttactgctgtgtccggtttccactggctggaacaggatgtcacattttgtatttgtcccgattggctagcaacttagaactttttaaaagaggcaaaggcagaggagaacaaaggaaggaggaagtaacttgtggaatgctgagaaaggtaaaaaccatcttcaaataaagaagaggagcaggctatgacctaatgcttgcttggaccagtataagcatgccagggcaaatatttaggctaaattgtgggagctaagaacataaaatacatttttttttttttttttttattacagctagcagatatttaagaatgttagcacacgtctttgagtaaattttgcttctaagagaggttgctatttattcctaattagacagggaggaaagtctttgaagaggaacctctactttactttttacatatgcttatttgcctgtaagagaaagggccctgggcctgatttcaggtggagaaggagctgctgggagcatcctctatttgttcctccccctagggaccctgaacttacaagggagtcacctaagtcccccagggcaatgggctcatgccctagtaatcttgtccatctgtgctctacatgctgagtctcaggtgaatgttgaggctctgtctttgcccagatgagggcctgggggctgagccctggctagtgaccagctccaggagccactgcccttggacagctggtaaattgtggctcccggtcagcccaggaggcaacaatccagctctggcataggctcctcagggctccacaggattccacagacccctcagtccagaccctgacttagttctccagggtcttctcaaggtcatgtccatagggagggcatggggtgcttggctgagactgacctccccctgctgagtcccccccatcagactgtctttcctcagcagtgaatgcctgcagggtctggatacgggaaaggaattctgatctgttgaagtttgtctaccctgtatgtgtcctgcagtaaatgttcaaaccccaacatgggacgtaatacagaaggggacacaggcacagcccaggcctgacaatcccatgtatgtgaagtagaactgacccccaacagtcagaggctgtgggagaatcactcagtatacatggaactggccagatacttcttctttctcagggtttatctttatggcgtgtagggtgtagaatcctgtgtcctgggtgacattctgaatcagcagggatgcattggggtatattgtcccttgaatgctgtgggcaggccctgggggtagttattagagttcctattacatatcctgtaatatggtggttggcctccaccctttcccctttgtaccagttatagccaataagatcatggggcagattgtgagtgagtagaagaacctccttcccctttgtggcattggacagcatggcttcaacagtgagcatggcagtagtgggtgggttccagaaagttaaaactgaggctaaggtgggggagagaacatcagtcaatattgggacctatgtatttggatggaaagatggggccctgagttctgaggaggtctcttcaccccctagccctggagagagagagagagagagagcacgtgcacgtgcacgtgcatgcatgggtcctgctgagtcaaagtcagcagcatgacccccattccctcagcacctctgaccttggcacttccaagtttggaatcctcttccccaggagtctgcacaaacccccaccccttatcgccctcagatcctgctcacatcaggacatccttgggagacccttcccctgacacctcctctagagacccttgctcttctcttctctttctgacctttcccagctctgttccctccagggctcttgtcagcacctgacctcacattctagatctctttgggtgtctgtcttcctcccatgagagcgtgagctccgtgagggtggggacttttgtgatcttggttgcaccccagtgtctgggacaggctgcagactcctgtggatgagttcatgagtgttcccagggccctccatggcctgaggtttgtgggtaaggacagtgtttagtggccctggttctgtttttttctggagtgttaccctgacataacattttattgtcatcagttttcagaatttattgatcagtgatgattcacttgcagtatattaacagtggagattgtttctccattaacagcttcagatcattgagattttcctggtgtgacccctgtccctctctggtgtcctctcctctgaggctccaacagaagccctctgtcccccctcagagtcccatcctccccaggagatcccagtcagtctctgtgctccctcctcccacccactcccaaggagtcctcccctcacctgtgagaaggaacccctgccaggggatgcgccctctgcagggagggctgagggaagagcttgagctccaggaacgctcttgtcagggctgctgtgactgtcagctctgctgtccttcctccctgtgtgctgagcctcctcccagggcaggagcacttcccagggtcatgggtgggggtgggctctgcccaggaagcctctctgccccctcccctctcagtcctgccttcttgtccattcttcttttttccgttctgtcttcatttacattccccagactatgctttgagaagcaaggtttatttggacccctgtcccttaacaggacaaatcaccctccccagcactgatctctgctgtgtcttggccttgggtctgtcaacaccacacagagagtccctggggtccccgaacctggtttgttgtctctatgacaaagaaatccctcggtgtattcagggtcttcttagtgttcttaaatgtctgggaaggttggatttcctcccagcaaggaggtcacaaagatgtctggggtcctaggaatggacacatctggggctaaagcccaggtctaagagtcttacttgttctttctgcagcgctatgtggccctaatttcctgggagtaactgagaatgaagctgcacgttgctgtagtattatgtcatccagacctcagacatttctagatcacctttatgattttctctacagcttgttccacatttattatttacttcatactatttttctttttttgagatgggattttgctcttgttgcccaggctggagtgcaatggtgcgatctgagctcaatgcgcaacctctgcctcccaggttcaagcgattctcctgcctcagcctcccgagtagctgggattacaggcatgcgacaccatacccagctaattttttgtatttttagtagagacggggtttcactatgttggccaggctggtcttgaactcctgacttcaagtgatctgcccaccttggcctcccagagtgctgggattacagacatgagccaccgtggccagcccatactatttttttctaaataaatttagtttacaaaacatctttgtttatcagggcacagtggctcacacctgtgatcccagctactcgagtggctgaggtggaaggattgcttgaggccaggagttggagacaaaacatccttgtcttatgcagtattgtccatgaaattacagatttgatgtgtgcttaaatgtttttctaacatgcattaaaataaacacatgagtattaaaattaaaaaacagcttatttaactttcacctaaaatcagttttgggaaacgctgatacagtggcataagcatgcactttatatccagatagacctggggtcaattactggctccatcacttaactatgtcaacttggacacgtcacttggcttctgtgatccttgattccctgatttgtaaaaggaggatggtaaaatccaccttgcagagttgttgggaataagtgagctgctgtgggagccccgtgcccaggcagttgttgagtacatgatggttatcattgtggttattgctgtgggattctggttattttccagagagagtgtctatgctggaatattgggcttgtggctttctggtaatgtacatgtgtgataagttactttttcgcttgttaggacttgtggtgcatctgtcattattttcatgtcacagttttactatctatttgctctgcgattttggtcaagttgtgtaacttttctgtgcctcatttacctaatttctaaaatgtgggtaacagtaaactagtgtgagtgtgtatttcccagatctgaccactagagagcacagaagcaccagcaccttctaaccgtgggcctatcagtgccgatggcctgcaaacatcgttctcccatgaaaggaaccagggctccctggagaaatagctgattccagggctgggtcaggaaagcatagaggaacctggagctccttgtggggccagaaaataaggaactgcacgaaaaatggtggggatgtgtcaaaaggtcacagatttccaaggaactctcaatggtcaattttgggacaatatgaacaacataataaataatgatagtaatggattccagttcataaatacccatgaatccatgctgatataaataaataattgaataaattaaataaatgaggaagcagaaatagctttttcttgtagcagaattccagttaataaatgtagaaggagtggtggaaatggaaaatcactatttggctcacaacacaggaattgttatttataggcaaggatcatcatggaatatgaagaggcctggaatgaggcaggagtgagaacaggtggcgtgattttgtttccctgagaggagggaagaggcaagccatgagtcaaagccctttgatttttgtttgacagttcttctctctgtgttttcaaattatcccagcctgttgccttgtcacagagttggttgtgggctttgctactgcaggggttataaagcacgtgcaggggccagggactgtgctaggcagtggagcctgtgtgtgaattgaagggtcaggcagggcctaagcgtggtctgatgcaaaccactgatgtgacttctttcttgaaaattctaaaaataatctctgccttcaggagcctcaagtctaatgagggagatgacatccactttataaagcctagagatatgagtgcagtaatctctcaaagtggcagaagtgcatgggggactccgagttgggtggaacttgagctggcctcacagggcagggtaggatttgggttggtggagggcagagagaacggctgtgtggagcaggggtgtgttgtaggagaggcactctttggagctctttgtatggagatcattgagggtaggggctgtttgtgttcatttttgtattccctgaactcatagagcctggcactttgggagtattctataattgactgttgaatggaatgatcgtttcgtaacctgttaactgggcctgatgtgttagaaaatatgtaaaagtgcagcctgtgtattagaaaatgtgtgaaagtacagcctatgagcagaaagaaaatcttactgaaaagcgatcccacgtacacatggagcctggtgcggccgctttacttatgctgctgagttctgcatcagtccacaccgaggccaccacaggggccgggagctcctcctcagaccttcctctgggtccctcaatctctttacccccctgttctcccaggtcctgctccctgtcagttcactccatctggtttcccctccatgcacttggggtgggtatcacatcctgtgtctcatcacagggggctttgggtccctcagatccattgattaaaacacctctaaaacaaatggactttcctcttgttaacatgacaacttcttataatgcatttcaagaacattatttgtgtcaagagtctctctgatgtacagaggccctccctcccccaggaaggaggtcaggggaagttaggagaaaacagtgtcctgtctgggttgcttatttccctattctgcagtgtatttggtagacgttcaaaaatatttgttgactctgtccatgatccacatggctctcatatagtcatttattcacacacacattcagtgaggctttgagcgcctagtgtgtgcctggtatttgctagatggtggatgctgagaagatcagatgtgctgctgtctctgaggagctttcactatatagctgcacctagggtgaccgaatgcacctgccccactttacagacatggaaattaaagtgcaggcaagtcataggactagttcaatgtcacaaggtcactagcctcaaagttataggagtaaatcaagttttctgacttgctggattttctgttagtgtgcagccacctggctgctgcaggtgcagacatggtgagctccgataggagcgaggacgctcagagtgaagtgggagccctgagcaccctggattaaccaggaggacatgccgggtccagctatgactgcacagaggaccatcgggaacatttgaattctctttttcactttgagcttgaaatgaagaaaactgatcccagaaaaccaagcgtggaaggtatttcacagggcattggtgagatgggtcagaaaatcctgtgttgatgtctgtcatcatgtttgtcactgaatagtaatggtctgactttgagtgggttccatctgtagcctggagctctgtgaggcagggaccaggtgtgattcacctttgtctctccagtgacagtacacagcagactccgataagtattttttttttttttttttttgagacagagtctcactctgatgcccaggctggagtgtagtggtatgatctcggctcactgcaagctctgcctccagggttcacgccattctcctgcctcagcctcccgagtagctgggattacaggcgcctgccaccatgcctggctaatgttttttttttaatgtttttagtagagaaggggtttcaccgtgttagccaggatggtctcgatctcctgacctcgtgatccgcccgcctcggcctcccaaattgctgggattacaggcgtgagccaccacgccccgccctccgataaatatttcttacaaaataaaacagaataaaaagtagacatctgcacaggtgtgggatgactgagcagcagcagaagcaggaaaagtcagcgtccccagatcagctgatgtggcatttggcttctagataggggtgaggtgccaggacagggacgggggtcctggggctctgctgctctggggaacacccctaggatttggagtgtctgctgtggttgctgcacttcacttgaccatgggaaagtgaccagagggtgtggggcttcaggtgaccctatatgggaaatggccgagggaagattgggtgggtggtgcatgggatggtttacccgtatttgaaggtcagttgtatgaaaagatgttaaacttatttcagcctatggagagtaagatgaggattggtgagtgtgaatcagacaccttttgactcaagacaaaaaagaactgttacagtaaaggaagtttccttggaaaattacaagtttactggcagaattcaagccagggctgggtgtctgaaaatacctctcagaatgatttttaagctaacaagggcagagcttggctaggaatgtggttttccactgatatcacatattaaaaaaatgtcctttgcaatgggacattgctcaatgatgcaggctgagctctctatgacagttactttcagtcatgtgggcagctgtgattctcttatccagtccgtgacttggacttcaccaactacctctggcaggctgcccctgccagccctatcccctcttttaccccaggagttaagtgcattaactaatgatggccacaaggtggcagtgctgctgctgctgcttttttttttcttttttctttttctgagacggagtctcactctgttgcccaggctggagtgcagtagtgcgatctcggctcactgcaacctctgcctcccgggttcaagcgattctcctgcctcagtctcccgagtagccacgtagctgggattacaggtgcgtgccaccacacccagctaattttttatatttttagtaaagacagggtttcaccgtgttagccaggatgatcttgatcttctgactttgcgatccgcccgcctcggcctctcaaagtgctaggattacagatgtgagccaccgcacccggccctctctggtgttttctaaaacctctacctgaatgtgggcaagcctaagaggcttttaggattaagaaaaggtcatgaatgaggtgaaaggtaaacttcattattatttttctcttgtgaggtgacatagttgagtgtgaaatagttgcattttagaactggaagacactggagagaagtgcttcacaaatcttaatgtgttcatggatcacctgaagatcttgattaaatacagattcggattcttttggtggggcctgagattctcaatttctaaggcgcttttggatgatgtcattgctgctggttggtggaccacactttgagtagcaaggcttgagggtcatttagagattaattctcattccatgtgatttatggctgaagagagaccaaactacagagagagaatataacttgccttccataactatgccctcactgcatgactttttgcatttaaacccagggcttcagcttctccgtccaattctcgtttcatgcatcacgtggcccctacactgttgttggtggcatctctttaccttaggaacccagaactccatttccaccacccactgatcttggctcaaggtttcactttgactgggtctgcccttcctcaaaaccttgaggggctcttctataatcacaagatcaagtttgaacctcggtgtctactgttcatgcctctacaacatgtgattccccctttagcaagcttacataacttccctgtttttttaactgactctttctgctctagctctccctgctccttcctgttccctacacatacttcgttcaggtccctcaatggtagtggtggttacatggtctctggtgttagactcaccgagtttctaatcccatacccaccaccgaccttggcaagttacttcccctttctgaggatgagcatcctcctctgaaataatttcatgtattgattgagagagtaaataaaataacatctgcaagcccactgtcattcctcggaccctctttaaaactagcatctacacagggtggggaacatcacacaccggggcctgtcgtggggtggagggaagggggagggatagcactaggagagatacctaatgtaaatgacgagtaaatggggtgcagcacaccaacatggcacatgtatacatatgtaacaaacctgcacattgtgcacatggaccctggaacttaaagtataattaaaaaaaaaaaaaccaaaaccaaaaaaaactagcatctacagtggtgcctgacacctggttccctggcttatgtttctccatgtctctgctttcctaaggctgaaccattcaaggcctaacctgaaccctgtctcttttgtgagcatttgtttctttctttcttttttcttttttgttttgttttgagacggagtctcactctgtcccccaggctggagtgcagtggcgcagtctcagcccactgtaacctccgcctcctgggttcaagctattctcctgcctcagcctcctgagtagctgggattacaggtgcatgccaccatgcacagctaattttttttttttgtattttagtagagatggggtttcaccatgttggtcaggatggtctcgaactcctgacctcaagtgatctgcccgcctcagcctcccaaagtgttaggactacaggcatgaaccaccacacccggccttatgagcatttctgacccaattgatcccacccttctataaattgtttcacccatgtattggcatttaattatgtcccagtgagaccccatagggaggctggaagggtgttggctgtgtgaaaactgaaggtgaattgagtgagctcctttcttactaccccctgagtgttagagctaccatctcttttttttttcagctattgccagcagcagttcctcctgcgccagctgcaccagaccctgggcaggcaagtgaataccttagggtttgttcctgtcagggtcactcctgcctctgggttttggtgaaactggcgttttcttttgcatcttatcaggtggcccctctgaggaggttattgatgatatccctttatggaaagcctaaggtaataactctaaggaagttgagcacagtattttctaacttaaacagcttggtggcaggagatgtgtacactttcctatttcataaaatttacaacagattcagaagagattaaggacaaaggaccaaatggggaggacaggtttgtttaagggaggtcatgtactttcaatctggagtctatcaattgttcattcaactctgtgtggaagtgtgcatctttgcatgtgtggtcgtatatttggatcacatgattcataattctgtccctgtcagtggcaattaggagttcatgttaggcttatgaggataaaatatatgggtgtgcactattactgaagccagggtttctgatatctggagagaaaataggccaggagggctggtcactttacttagtgccctgcctttctctctctctctctctctttctcttttgagacagagtctcactctgacacccaggctggagtgtagtggactatagctcacttcaacctccacctcctgggctcaagtgatcctcccatatcagcctccttgttagctgggaccacaagcacatgccatcatgcccagctaattttttgttttgtttatttgtttgtctgtttttgtagagatgggttttcaccatattgctcaggttggtctcgaacttctgggctccagtgatctagccattttggcctcttccaaatgctgggattacaagtgtgagccaccattcccggccctgccttctctttttattagacagcagtctactcactcatcatgttcccagtgaggggatttttaaccttctcattttcctaccaggggtccatgccaaagtccatatgtgtttaattgtgtctagaattggatgttctttttgaaaagagcagcccaaggaatggcttcttagctgatatccaggattctaatcttcattgtctaaactttgggtttccattcctggatactggttagagtaacttgtagggcatttaaaatgtaccaatgtctgtgctttccccaagtatgtctgactggattggtgcattgtgtgcccaggcattggttgtttaagaatgcttccaaggaaaacggtcattttattgtggaggaattttagcccagggctcaaagttaacatcccattaattagagatatcgacatcttagggcatcctaatataatggatggagaaggcacaaaatcgcctctttggttttcttgaccgaagtgtataacctcagtttaatcatgagaaaaaattagaaaaatttaaactgagggtaactacaaaataacaacgccaatacttttcaaaaatgttaaggtcatgaaggcaaaagaaattctgaggaactgtcccagattaaaggagactgagaggacaaaacaatgagatgcaatgtgtaattgtacattggaccctgttccagaaaaaggacattagagggaagataaagaggatttgaataaagtctgcagattcattcactgtatgatgtcagcgataatttattgattttaatgtttgcactgtggttatctaaaacaatgtttggggaagttgagtgaaaagtatatggggactgtatttttggaacatttttgaaagtctgaaattatttcaaaatgaaaagtttgaaaaaaaaaaggagaagaaatctagatatttctattaagttgccagacttgaagaccatttcccaagttatcttgcctaatattgtagagtaatcttcctggaaatgctgtttgtcacgtttgtgagcttctcagagctttccagtgacttctcttatctgtaggatgaagttcccattccttaggatgccactcagagccctcatagcccggccccaatctactcccttgatttacattgaaggacctgacccacattttactttctcatttccaaacattttctaagtcttttccctcttcatatcacacccttgcctgtcttctcagcctcctgagttgttctttgtcctaaaggcccatttcagaccctgtctcttcattgaagcctgtatatttatttctgttagaagcagtcatctttcctttctttgaattcttgcaggtacaatggtgtggagtgaaacatgagttttatttcattatattatattttagaaaaaaatcaatttattctgctcattaaaagtttttcttttaaaaaaatcttaaaattttcattggagaaggattagagattaaattgttgatgtttgaatttcgttgtggtttaaaaaaacttttattttaggttcagggtacatgtgcaactttgttatgtaggtgaacctgtgtcacaggggtttgatgtacaaattatttcatcacccagctactaggcctaatactcagtagttatgtttcctgctcctcttcttcctcccactctccaccctcttgtaggccccaatgtctgttgttcccctttttatgtccatgtgttctcatcatttagctcccacttattttttaattttaatttaatttaattttttttttttttgagacggagtctctctctgtcacccaggctggagtgcagtggtgcgatctccgctcactgcaagctctgcctcccaggttcacgccgttctcctgcctcagcctcctgaatagctgggactacaggtgcctgccaccatgcccagctaatttttttgtatttttagtagagacggggtttcactgtgttagccaggatggtctcaatctcttgacctcatgatccacccacctcagcctcccaaagtgttgggattacaggcgtgagccactgcgcccggccttagccccacttataagtgagaacatgcagtatttgtttttctgtttctgcgttagtttgctgagcataatgtcctctagctccaccaatgttcctgcaaaagagatgatcacattattttttatggctgcatagtattctgtggtgtatatgtaccacattttaaaaatgcagttttccattgagaggcatttcggttgattctatgtcttctctattgtgaacagtgctgcagtgaacattcatgtgcatgtgtctttatgatagaatgatttatattcctctgggtatatacccagtaatgagattgctgggtcaaatggtagttctgtttttagctctttgaggaattgccatactgctttccacaatgattgaactaataattgacactcccaccaacagtgtataagcacccccttttctccacaaccttgccagcatgttacttttttttgacatttttgataatagccattctgacgggtatgagatggtatctcactgtagttttgatttgcatttctctaatgatcagtgatagtgagctttctttcctatgctgttggccacatgtatgtcttcttttgaaaagtgtctgttcgccaggcagagtggctcacacctgtaatcctagcactttgggaggctgacgtgggtggatcacttgaggtcaggagttcaaaaccagcctggtcaatatggtgaaactctttctctactaaaaatacaaaaaaattagttgggtgtggtggtgggcacctgtaatcccagctacttgggaggctgaagcaggagaatttcttgaactcgggaggcggaggttgcagtgagccgagattgcaccactgcactaaaaaaaaaaaaatgtgttcatgtcctttgcccactttttagtgggaatttttttttcttgtaaatttgtttaagttccctgtagatgctggatattacattttagtcagatgcatagtttgcaaatatgttttcccactctgtaagttgtctgtttactctgttgatagtgtcttttgctggaagcatgagttttggattcagaaatatgagtctgagtcctagttccaccttttatcaggtgagataagggacaagttaattgatgtcttggaatagagggataatagtgcctatttaaagggtcattgtgagcattggatgaggtacaaacataaaggtccccagcaggtagcagattacttcctcttcattcctgtagctcagtggttccaaaggtattgcgggtggtgtgaactttcttatcaaaattttctatagatccttcaactaagatagccttgaactgaactgaatgcttaggactttaagaagttcaactgacgtttggatttttgtgaaaacaactcagtaaataagttatctatcaatagaggaatgtaacccaacagaggaagaagggaatgacaatgggattgtaaatgggagaaagctgtgatgccttccacacccatccctttgttctcagtcagacaatatcaaggaagtacaacttctaaaattatgtaaaggaaaataaacacctcaggactgccaaactcattacaccaaagggatacttcagcctggagattgagtcatgcaagaccaccattttttccccaaatgaacaactgttactttacaaccttgtgtcaaagcattgtacattagccagagccccaggagaagatgaaaaggccctaggcatatctggatgacctccctcacaaattgtttttttgctgtcctcgaaccacatttgaagtatatttgtggaacagactcttacaagtactcttaaatgttggcttctcataactgtggagctcatgtcactggactaggaaaaaaaacccaggactttagttaaaaaaaatgcattcatgatgattgctaacccaacatcaagcagaacaagagttaattacatgaggataaattgatacaggactaaaatgattttttcatgaccttttttttaaaaaaaaacattgctgactttttttatgttttgttctccagagtcaaaaaagctttttttttttttcttttgagctttttagcttacaacaaattgggtaaagtataattttgtgagctaaatttgaaagatttatctttctctctacccaatttctacaaaaataaactatttgtgcatattcttaatttatggcaatatagatatttgcataaattccataagaatttgttttcttttataacaggacacaattggagacattggttattttatagaggctttgagtgaaatggtatattttcagatatgaccagaatgctttgaggaattgagattgactttatagaactgacaaaaagcctcttggacagactgacctggttaccttgtctatgcagtttctataaaaagttaatgatctgtggtaagtaaagaatgtcactttctgataggcccaggaacccccaagttattttgagacctcaagaaaagaggaattcaccaaattcatgcaggtatctacaggcacagataaattactggcttgcatagccttgagatgcttttggaagtctaatctgagattccttatgaaaaaaagtctcagcaaagccaatttaaaaagactctctatggccaaccactattcttgccatactttatgcaaataatcaggccaggtataagactaaaacttatttagcaaatacatttgtcctgctatgatttgtctttcataaaaatgggagcctggagagagaaaaatttgtgtttcaaaagaaaacttcaatacaactgttattaaattctaggcttgttcattatttttgagttttattatttgcctataatttggactgaatcctaaattctttcctggctataaatatcaaaagtaatgatttcaagattttcttccattttggaatgttagaaattaaaactgtgcttttcttcaagccctgcaaactgaaactagacaagttaagtgaacttttggagaagtcacagcaacttatatataaacaacttttgtgcccgttgatgcatggactacacgaaagggtcacacgaatactggatttgtactgaaattcagagaaatctgtgagattgtcactgcagttagatgattcagagactctagaaaaatgagtctataggctgggcgtggtggctcacgcctgtaatcccagcactttgggaggctgaagtgggtggatcacgaggtcaggagatcgagaccatcctggctaacacggtgaaaccccgtctctattaaaaaatacaaaaaattagctgggtgtggtggcgggagcctgtagtcccagctactcgggaggttgaggcaggagaatggcgtgaacctgggaggcggaacttgcagtgagctgagatcgcgccactgcactccagcctgggcaacagagccagactctgtctcaaaaaaaaaaaaaaaaaaaaaaaaaagaaaaagaaaaatgagtctatagactgctgtagacattagaggtgagccaacatgcaactgaaagtgttagtgatcatggcccaaagaattgctctaattgaggaggcagttgtgtatcctcagttggattccaggattatactttgttgttgttgttgttgctgtaattagtccttggtccttttctgatttgacttcacccccttttccatgggagatgacttcctaggaatgagccttcatagtgatgtaagatcagatgaaacatagccacaaagtcatgtatttaacagtaatttctctgaaagatatagaagaatgttggaggtgggcaggtgtggtggcacaggcctgtaatttcacattttgaaaggccaaggtggaaggatcgcttgaagccaggagttcaagactagcctgagcaacaaaatgagaccacatctctacaaaaaataaactaaaataaattagctgggtgcagtggtgcatgcctgtagtctcagctattcaggaggctgatgtgggaggacctcctgagcccaggagttccaggctgcagtgagctacaatcatgtcactataccctagcctgggtgacagagcaagaccttgcttcttaaaaaaaaagtgggaggcggggttggggcaacaggaaggcaaaaagcctcagggatctccagatgactgccctctaaatagttctttgctggcctcaaaatctttcaagatgtatagcgtttcataaaacaaggcatgtcaattataacttcaggtgtgcaatcaaaatctagctcctaaaactaaagcctgttaagttttattctgataatatttatcttcccaggcacagaacaaaggcaaaatgagatcaattattcttccacctatcccatctctttctacctgtcttcccccctgtaaggaaatatataaatactaagccttctgcaacctcttcagagagaacacacccacagaggttttctgtgattcatgttttcccagggtgcaccctcaagctctggctcaataaaccttaactggtcaagacccttgcctcagtcaatcattctggatgaccaccatgagtcttgcacaggccttcactgatccctttgctgcccaggtgatgtgtacctaggtgaatcaggtccccacgagtcaaacactcttctccctttctgcctcctctacctccctctcctcattcagtgccgtgtgccctggtctggccccagctccaggccattagtattagcctaagaaggcaaggccaggatgaacaggctgagaaggaaatcagaggccaacaggcatgaaaagaggcagatgggactgtcatttctcagagccacccactctgggtgtgttttatgactgctactggatttggaatcttttcctctttgtggccataatgggaactcacccttctcctacttccttcccattacactttctattcatagggaactccttttatgaccagagaaaggctgtaaaaatagttgacaattgagtaaaactgactttataatgactgggaacctggctctgtttttttccaaaagagactgagattcctcaaagctagcttttatgcagggctgtgcagttgtgagtgtagcattagggaacaggtacataagtgaagggtgagacagaaaacaaaatgctggctctttgtcaaatcctgaaagtagagggggcaaaaatcattctggaaggtgtatgtcattcaggagaccttggaaatctcagggtatcctcttcccagatgaagtggaggatgaggttaaattatggagttgggtgtgtgatactgggtacattacttctctgcctcgttttttttttgttgtttttttgttttttttgatggagtctcactctgttgcccaggctggagtgcagtggcacgatcttggctcactgcaagctctgcctccagggttcacgccattctcctgcctcagcctcccgaatagctgggactataggtgcctgccaccacgcccggctattttttttgtatttttagtagagatggggttttacgatgttggccaggatagtcttgaacttctgaccttgtgatccacctgcctcagcctcccagagttctgggattacagttgtgagccaccgtgcccagcctgcctcatttttttaatctgtaaaaatggggataacatccaggaatttttgtgaagatgttaactacatggaaagatcttaggatagttcctggcacatactgagttttaagtcagtgcaaactattatgattatgggaataggaaaaggtgccaccctggacgtgtaggatgagggggtattttctagccagggtcctagcaggccaaccggagatgaagatggttaagcagaagcagcttaacttcaggagtggaaggattggggagcagtagctcatgcacaagattctgtgaaaatgcctttacctaacagcagaaatacccagaatgggtgtggcttctgtcacaattattgtctaaaaatgtgtcgtagactcaaatggcgttgatgtaagccaagtacagaaaagggcttcagggctgccttgcacatagcattcatcttgtcaaaggaaaacattcatcttgttaaaggaaaacattcattttgctaaaggaatccccacttgtagccctggttattatttttgtctcagtactattcttgtttatagtttgtaaagagaaagactgaagaagtgtgaaatacggaagtgcatgtatgaattaacagggcagaattgggactggtatgcgtaagttaagagaaagtgcatataaatttatgtgaacataaagaggacttcttgttttaagcagacctctttgtataaaaaatgtgggctgtcttgagtggatggcagactctatcacaagaacattctagcagagtcacgagagaatggggagcatgacttctttctaaatggcaagttaagagtatgtaagtcgatgaagagagaggagatgaaggagaagatgggtgaggatgagagaaatgggatagagaaaagaacagactgaaaggaatgtttaccaagtgctcatcaggtaccagcctctgtgtctaataccttacacatcttaatttactctttgactgtcattttctgataacagtaagagtcatctttgtgctgcagatgagaaaacgctgtaggaggtgaagtgagtggtccaggatcatccagccagttcatagcagagctggtgtgtttcacctcaaagtttgtgctcttgcctgtgattcacacaaaacaatgagatatagaaagaaggcaaatgaaatttttgttgtgggtgatgtttatggaagttaccagtgttaggcagaataatggcctccccaaaatgtccacatccttatccatggaacctgtgcatgttactttatttggcaaaaagacttcactcttgagatggggaggttattctggataatctagggtggcccagtgtaatcagaagggtccttgtaagtgaaagagtgaggcaggaaggtcagggtgaaaatgctgcagtctgagactccactaaccattgctggctgtgaacatgcatcagaagacaaaatttcaactaatgtagttatagatctgattggcttttaattgtgattcagggtttggggcagctctcactctacacatacagtgatagctccccctgggcaacataataacagagcaatgggttttgtcaaattggaaccagtagacagagccatagaaataaatggattggttaacatcagggtacttcaggttactctttttggggtaaatgttaaagcagaggggacttccttatgatgttgactcagggagactggaatcttctgttttcagaaaacattggtctgttttgagatctgcttccttaaaattccagttggagtatgcagcatttagtgtgagtggctctaatttggagtctttagactctcacttaagtgagagtgtgaccaaagcttaaagcattagcattactctcagttatcatcatttttggcttccattgtttataggttatgatatcctcctgatcacacatttctttgagtttatgtagttccagccaaatagagaccatttgatatttgatggatggcagcacgcaaacacttaaaacttttagagattacagcacaccagggagaccagtagtatgactatgaggaagataatgttaagagtttggagtatgcacctttggtaagatgcaaaccaactgaaatagaatagataaaagaatgaaccagatgagtgtagccattttaaccaagtagcatgtttgttaatttttgcaactgagactctataatacccgatatatttatccatgtgcaacaagaagcatcataaactacacagactcctctctgatcagccaatagggagcaattttattatctagcattgcatgcctgggttaaattaaaacagacagtgagaacaagtgagtctaggagtctgactctaaaagagaccatagtacatttgaacaaagagttgtgttaaagatgctgttactgtcagccattgggtggactaaaggatctcatacgtaaaaatttggggttgacacgatagattagacactccgttaatctatcattctctgtattttctcaaatataacatcccaatcaaagccttggtaatataaccaatgttttaaactatatcccattataaagacagcagattctcactgaacttgtgcaaataactgaattaccataaacatatgaatactcatgaatagttgcccagttctgtggcagtcaggtagggagcaaaagtaaatgttataatttttgttcacaaaagtctgctttaccaaattgcagtaaggtatagatagcttaaaagataaagaaattcataaatctgaaaaagaaaacacttaaagaattggcaatttttcaaataaaaaatcttaaaaacgggctgggcgcggtggctcacacctgtaatcccagaactttgggaggctgaggcaggcggaccatgaagtcaggagattgagaccacagtgaaaccccgtctctactaaaaatacaaaaaattagccgggcgttgtggcaggcgcctgtagtcccagctactcaggaggctgaggcaggagaatggtgtgaacccaggaggcggagcttgcagtgagttgagatcgtgccactgcactccagcctgggcgacagagcgagattccatctcaaaaaaaaaaaaaaaaaaatcttaaaaacattatcctcattattatttagttcaatgaaattcatgtttttttccttctgtgttttggtgggcaacttcacaaaggtatcagcctgtttgcaagttcatagacagtccagtggcgtgatcttaaagttatcaggaacttgtgttcaagagtactcgtcagagtattttccataaatcttgaagaagaagcaattttgaatggtagctgattgcaaatgctttgaggaagaataaaaacaactgtctgtgaatgacaaagattgaaaatgactatggttaaaactctgaggagagctcattatgataaagacacagccacatagaaatttagttacttctgtggcatatgacattatgactgataacatattcgatttctaggaaactcataatttttggaacactcatatcggtaacataaccgtaaatataacttagagaaggtttagcaccacttatcaattgacaatgctttccatgtaatttaacatatcaagtaaggctgggcgtggtggcttatgcctgtaatcccagcactttgggaggccgaggcgggtggatcacaaggtcatgagatcgagaccagcctgaccaacatggtgaaaccccgtctctactaaaaatagaaaaattagctgggcgtggtggcaggtgcctgtaatcccagctactcgggaggctgaggcaggagaattgcttgaacctgggaagcagaggttgcagtgagccgagattgtgccactgcactccagcctggcgacggagcgagactccgtctcaaaaaaaaaaaaaaaaaaaaaaaaaaaaaaaaatatatatatatatatatatatatataaaataaggtggcttttccacttagcttctgtttctcaactggattactgagttcttggtggagcccattaatgaacagggccagcaaaatataggcttgtatatgttgaaaaagttttctaggaaattctaatactcccagctaaagaaccattgttttagcctcatgtgctacctattagaacaggagttctccatcctggttacatgttagtagcatctgggaaggcttaaaaattaccaatgcctgggtcccactccagatagtaggtaagaatttatggatggggcttgagcatcatttaaaaaaacatttctcagtgattccaatgtgtggctatatttcccatcagatttctctgatttcttgtggcattcacttttttctattttggtattatgattatttttcatatcttatctcctgtcttaggctgtatgttctctggggtagggatcttgcctttttcatttctgtatctttcatgaacacatgaattggtcatcaggaaaaggttctcaaccacacgtaggctgtgtcctgaatctcaggttcacacattaatgctagagtcgttgttctccatgaggtcagaggttgcttgctttgaagggtatgtgggcaactccacagttcagatagtggatgggagattaccctgtttctaggcatagcattggaactaagaattctatgtgtatatggggtagatgcgcagggaagtgtaggaagacagttctaattaggatggaggaattatactagggagtagagggaatggaagtgagaagaattagtaaagagaagaaatgtgaacttatcaaataggccagagtaggcctctgaagattcttgagtaagtgagtgaactagattttaggaaggtaatgagacaatcatatgcaaggaagatttcaaatactagagacaagaagtcaagcaggacttcgagcagttgttgaggtctatgggaatggataaaatgacacaagtgagagatgttaagaaaggatcaaaagactttcatagtgtattgaatctgggaaacaaatgagcagaggctgggaataatcacatctaagagacagtggggtacagggagcatgcagaccagggaagaagagacctgcaggaattagtgctgagaagcaggagtttattgggaggaggaggagatccattcccgggatacaggtctctctcccaagcatggcggtcagccctgcaggaaacaggacaagaggaaaggccatcatacctgccagtcttcttgaaatgcagaaactacaccagagctactatatcagagccaccctggccagtactccaatcatgatgctgacagtggctctagctgagaggccaggagaacttccttgtactaaagcatctgtcatggaaagaaaagaagagaaggaatgaagttgatgccattttacagtggggtaccccaggaaccagctcctagcatgaagtagtctctacttgttttttcaaggaatacattatttttgtgggaaggttgctgggacgtgattagccaactatattcttgcaggattttttcctctcaccatgtttctaggttgacgatcagtcttcggtcaatttcatcctggcatttctttactcagatattttgaaggctttgtgatgtgaaaaagctgattgctattttatgtgtcattagaactttccaccttttcatggttgcatctttttctcagtgtcttagttgtggcaggtctctatggcagggagctgattgacagaaggcccaggtcagtgcattccaaattgaccacctcctttgcacagagacctctcttcccaggggctcccagcaggggtatggaagcaagcccagttttgtgagactctgtttaactctgatgggtgactagttggaggacgccccatcagccttgcctaaactcacttagaactgcactgctatctaaaacttctttttctttctccttcacaggaatcaaatctgcatcgtggtctgagggctctcccaggctcctctcacacctgccccattttccctcacaggtgtttttcctagtaaattatcttgcgtgtctaatctcatcttggttgcatctcagtgggttaaaaactaacataccaggtttgattctttgcacttagctttttttctctctttcacgtgtaaccagtaaccatgtcctcgtgtttcctgtgttgccttttttttatatgtgtgtgtatttacctaagataccttttacacacacacacacacacacacacaaccttttgcatctgtttctttatttctattggaaccatttacttttggccctcaccagtcaactcaggctgatgattaatgctatgttagctactgttgaggggcagctcctatgggccaggccctgtgctaaatactttacctcatttgatttatacaataactctcttgggtagaacattatttccattttacagatgaaacgacagaggcttagagtggtgaaaaaactttcctgatgtcatatggctggtgagaagtagacttgagatttgattctaggactactcagcttcaagctaatgataacagtagtaatatatcagctaaaatttatgaaacatttcctctgtgtggggcattttgctgaaggtttcattgatgattacataaaactcttaaaacaatgctatgaagcaaacactgttactgcaattttcagttgaggaatcagaggctcagagaagttaagaatcttgtgcaagaaatttataactgttaagtcttacattaaaaaagaagaaacatctcaaatcaacaacctaatttgcaacttcatggtacaggagaaaaacaaactaaacccaaatatattgaatgaaggaagtaataaggattagagtggatataaatgaaatggagaatggacaaacaatagaggaaatcaatgaaaccaaaagttggttcttcaaaataagatcaacaaaattgccaaccattaactagactgactaagaaaaaaagagacaagatggaaattactaaaatcagaaatgaaaatggactcccagcatggtggcttacaccttcaatcccagcactttgggaaggcaaattgggaggattgcttgaggcctggagtttgaaaccagctggggcaacatagggagaccctgtctctacaaaattaaaacaaaaattcagctgggcatgatggtatgcacctgtagtttcagctacctgggaagctgagttgggaggattgcttgagcccaggaggttgaggctgcagtgagttttgatcgcacctctgcactccagcctgggctgacctaaggagtgagactcgtctttctctctctctcaaaaaaaaaaaaaaaacaaacaaaaaaaaaacgaaagaaagaaaagaaaatggagatattatatatcaattctagagaaatattgtttacaaaagtactatgaataattgtatgccaataaattggatagcctagatgaaatggacaaattccaagaaacacacacaaaaaatctgaatagacctataattagtaggaagattgaataaaaatttcatttgacaaaattcaacattctttcttaataaaaacatgctaagtatgaatggaaggaaactatctcaatataataaaggcagtatgtgaaaagcccaaggctaacatcatactcaatagagaaagactgaaagctttccccctatgatcaggaacaagacaaggatgcctgcttttgccacgtctatttaacatagtattacaagtcctagccagagaaattaggcaagaaaaaaagaagactttcagattggaaagaagaagtaaaattatctgtctgttcacagacaacttgaacttctttgtagaaaactctaaggatgaaaaaaacctgttagaatttattaataaattcagtaatgttgcaggatacaaaatcagcatgcaaacatcagttgcatttctatacactaacaatgaacaatctaaaaaggaaattaagaaaaaaattttaattcacattaacatcaaaaagaataaaatacttaggcataagtttaaccaaggaggtgaaaggattgtattctgaaaactagaaaacattgctgaaggaaattaaatacgacctcaaaaaatgggaagacattttgttttcatggattggaagacacggtattgttaggaggataataccacccaaagtgagctatggattcaacacaatttctatcagaattccaatgacatttttttgcagaaatagaaaaatctatcctaaagttcatatggaatttcaggactcaaaatagccaaccaatcatgaaaaaaggaaccttgaaaaaaaaatgctgaatcctgatttcagcatttactacaaagccacagtaatcaatacaatgcagtacttgcgtaaaggaagacagaaaccagcggaatagaacagaaagcccagaaaggaatgcttgcatatatggccaaatgatatttgataaggatgccaataccactcaatggggaaagtgcagtcttttcagcaaatgattttgggaaagctggaaatccatgcagaaagatgagctgaacctttacctgacaccatatacaaaaaactaacccacagtagatcaaagaccaaatgtaagagtaaaaactataaaactctcagaagaaaacacagggaaaaaaactccatgacattggatttcacagtggtttcttggttataacaacaaaagcataggcaacaaaagaaaaaatgggtaagttggacttcatgaaaatcaataacttttatatatcaaagaacattgtcgaggaagtgaaaaggcaaccttgaagtgggaaaaatatttgtaaatcatgtatgataagggatcaattttcagagtatatgaagaactactacaaatccacaacagcaaaaatccaaaaacccaactaaaaaaggacaaaagactgaaatagagatttctccaaggaagatatacaaatggccaatgagcacatgcaaagatgctcaacatcactgatacttagagatatgcaaatcagaaccccaatgatagaatacctcaaacacattaggatggctttgattaaaaaaaaaccacacacacacaaacaacaagtgtttttaaggaagtggaaaaattggagctctagtgcattgctgatggaagtgtgaaatgttatagccactgtggaaaacagtatggctgtttctcaaacaattaaacaaagaattaccattggatccagcaattccacttctggacatatatgcaagagaattggaagggatttgaacagatatttgtacactgatgttcacagcagcattagtcacacaatagccaaaaggtggaaacaactgcaaagtccattgaaagataagtggatagaaaagtgaggtgtatccatacaatggaatgttcttcaatcttaacaaggaagaaaattctgatacatggtgcaaaatggatgaaccttaaaaacattatgttaagtgaaacaagccagacacaaaaggccacctattatataattccatttatataaggttgttagaataatcaattacatagagacagaaagtagaatggaggttgccaggggttagagggagaaggagtgagagttactctttattgggcagagaagtttatttaatatggtaagatgaaaaagttctggaaatggatggtggtgatggttacataacactaaattgcacgcatagaaatagttaatggtggctgggagtggtggctcatgcctgtaatcccagcactttgagaagccaaggcgggtggatcacctgagttcgggagttcgagaccagcctgatcaacatggagaaaccccatctctactaaaaatacaaaattagctgggcgtgttggcacatgcctgtaatccagctacttgggaggctgaggcaggagaattgcttgaacccaggaggcggagggtgagccgagatagtgccattgcactccagcctgggcaactggcactaccccttccctctcatgcagagaccctgtggctgaatctccctgtgtctccaagtgtgcatcactcactgtcctctgtgttgtatccacagcctcatgcagcccgtgacttcagagctaggacactgctcaggagtcttcccggaggctccctgtcttcccatttttgtgcagcctgactggggggaggcttggcttcaactggcaacttgatttagccagatttgggataggccacctgagcaccttttccatacacctgggtcccaccccaggtggagtcagggcagggcctgtcaccagggagctgggagcagagatgggagcagtctgagctgctcctccgtcatccaaggggctcctcctcccatttggggaacgttgtgggcttgtttcaaagccttggatgtttcttgcagctaatggcataggtaaaagaaaacaaaggggtaacagaaacaggggtgccatgtgttggtgacaaagaaaagcaacttgaccttgaggaccctccttcttcccccttggtgaagtcctttccatgacatagggctctggggctgacgaaggcccctctccacgtttctcaggtcagccccgaggtcagccaagagaaatcagaaaaacaggcagaagagagtctatagagataaactgggagggtttaggagaaaagttggggatttgcttgtgctgttggacacaggctgggaataaaactttttttctggctcatctctgaaagccagatagactctaccagaaaacatactgccagtgctccagggatccacttaccagagactgtgatcatcctgactgtggtcctgttgcggccagtggctgagttagtggtgtggcaggcataggatccgctgttctttgtagtgatgttggggataaagagcttttgtgtgtattgctggaatgtgccattgacagaccaagaatactgtgagggtggattagaggccgcatggcaggagaggttgagatttacccctgcatggtaataggtgtctgaaggggaaatggtgggggcatctgggccatctagagcaaaagaataaagtcacaggtgatgtcatcagagggaaggggaagctcctggtctgtggaagagccacagtgtccctctgagccaagtcacaaacctgagccaagtcccaaccaaccccaaccaaacccccgctgtttctactgagacagagtccgagacatttacctgtttctcccatcagaagatgtggactccaagtctcccatgacaggagcaccccctcccctcttattcttggtcaaggctaggcctacccatgtttgcctggggcagaaagtcatgacgagctgggtttctaggggtgggtggggaatctgcatttttggagctgagagggactgagaggcctggcctctggctgcgtggatttgggctggtggcctgggccacagaggaacagaagatactcacagaggacattcagggtgactgggtcactgaagtttgcactcgctgggttctgtatttcacattcatagggtcctacgtcattccttgtgacactgagtagagtgagggtcctgttgccattggacagctgcagcctgggactgaccgggagactctgaccatttacccaccacaggtaggttgtgttctgagtctcaggttcacaggtgaaggccacagcatccttgtcctccacggggttggagttgttgctggagatggagggcttgggagtctccgctgtgcagaaaacagagagaagattgccctgtgtggcacctttgattcctccacaggcaaatttcaattagagttggcatctcccacctctcagcctactcgagtccttaaaagcccacggtgggtgtgtgtgtcacaagacagatgcacaatgatcggggctcagagaccatgaggccgccttctctgtgtgggagaaacacagactttctcaaatgtgaattgggcagcagcgctgggttgtggacagacccaggactgggagttacagatcctggtgcctcttctggtccctccctgaccggctgcctgcctggcctacctaggggtcctcacctggaacatgtaggtgctgggtcccttccagcttcacagtcctactttgcccttcgaggtgtgtttttgagggttctgtttccaagaacattctagagatgggagatgatgggacatgccactatccttaattcctgactgggtgtttcaacagaaataacacaggggaggccggggcaagcctggaggtcggttccgtcgtcaggcagtggagccacaaggtggggcagtttttcccaggtgtttcatcgtgacttacttgagtcagtgacctctaaagatagagcagagtccaaggaatgatctagaaggagtgaaggggacaggcaagaacaggtggctttggagcagaaccttgtttcctttccttggtttttaatgtcccttctttccctgcggggggcagatgaggagctgtggatcctcccataaatacatgtggacatttgcaaatgcaaactgacgggtggggagggggagcctgaagtgctggaaatttggccctcatggaccgtgggtgtttgacagttatgagagagaaatttgggaagaagttttgcaaatattttctcctactggacattatacagagtgaaataagccactgacaggacagatactgtaggattccacttacatgaggttcctagggtagtcacactcatggaatcacgtagtagaatggtggttgctatgggctgggagtggggggaatggagagttgttcatgggtctgcagtttcagttacacaggatgaggaggttctagagatctgctgtacagctttgtgcctatagctcatatacagtgagtatttcttatgcataaggcttagggccaaaagtgttttgaatttctaacttttataaatttttgaacatttgcagtatacttactggtttagcatctcaaatctgaaaatcccaaatccaaaatgctccagtgagcatttcttttgagaatcacgttagtggccaaaaaatgtggaattttggagcatttcagatttgggatttttgatggtcaatgtgtaactctaatttgcattttaaaatttgtcaggagtttagatattatgttttgactatagtcaaaaacaaaattggaggaaacatgaatttttttccataagtagaaattgctattaattgtccacagatctaaaatcaattggtggaaggagtatttctcttgataacaaaataaggtttaggcgtcctgtgaattccagcaggatcacattatgctcaaaggaagatcctgaagttcgcttgaaattagcaactcccaggtagagggaggcacgtgagtcctgttaagaggacagaaccggtcagagaggaagtcttaggtgtgtcaattccataaagggaggaacaatgccaaattaggagaagcgatgtgtgttatgttagtaaatttagaaagcttcctgcccctaattcctatgcagagttaggcaaaattgggaggagcccaaaacaggtatgcgcaatgctttcttcattttctcttgacctcgggagacacaagtagaattggattaggtttttgcgaattggacagagtctaagtgagacgccagtggctcatgcgtctccccacctgaaggaccccatcttatcacaatggtgccatcatgaggacacagatgtgtgtggaacaggcagtaagcccatcagacagcacctgcctggccatccaggatctagtctctaaagaggttttgcatcattcattctctcattcattccctctccatgagagaacgatcgagtgtgtgtcacatgttgggcctgtcctggtgcagggtgtgagtggggagagaaagcaaagtcctctcttttgtcctcccatgggagtgacagcaacacatcaggaaacaggatttcaggttcagtgaggggggttaggatcttagagggagcctggacattcctcgcactggctctgacagttggggcaggtgatttagttctggagtacgaatgaatcagttgcttatttgctctcacttctctgagctttggatgctcaggaagaaaggatttgagccaatggatgaccatggggtccgtggaacgcaataagccctgccttcttgtggaagagaggacggggctgtggctggagagagacctcatgtgaccctgatctatccctcgtgtttgtgtgaccctggttcagtgactgtgtcttcctgtgcctccgtttcttctcaataataagcttctattaaaagaaataataggctgagcgcagtggctcatgcctgtaatcccagcattttgggaggccgaggcaggcggatcatgaggtcaagaaatcgagaccatcctggccaacatggtaaaactctgtctctaataaaaataccaaaattagctaggggtggtggcatgcacctgtagtcccagctactcgggaggctgaggcaggagaatcgcttgaacccgggaggcagaggttgcagtgagctgagatcgcaccactgcactccagcctggccacagagactccgtctcaaaaaaaaaaaaaaaaaaaaaaagaaataaaaagaattattatttctttctcaataggaaaatgatattttctgccaggttttctatgaattagcattaaattatccatagtcacctgacctgaagcttgcacagaggaggcgctcacacaaacagcacgggttattatttgcctccatgagagggtccccttggcatgatccctgctggacaagttgctgttaggaacatctttcttctatttctgtccctggggacactgaactttctatggagtctcctaagcctcccaggccagttggctgatggcctaagaagcttgtccatctgtcctctccactctgagtctcaggtgaaggacaagactctgtccttgcccagatgaggctctggggtctaagccctggctggtgagcagctccaggagccacagcccttggatggctggtaaatctttgctcctagttggccctgcccaggaggctacaacccagtgctggcacaggtttcccagggttacctggagtcaggatcctgggacaggggtctggagcaggggcttccagggatgaacttctctgtgaggatcccaggatcccagggagcccctcaggtcaggccctgacccagttctttagagtttttctcagggtcaggtccatggggagggcacggggtgcctggctgagtctgatctccttctgctgagtccccccatcagactgtcattcctctgccgtgagtgtctgcagggtctggatgcaggaaaggaattctggtctgtggaagtctgtctcccctgagtgtgtcctgcactaaatgtccaaaccctaaagtgggatgtaatgcagagagggacatgggcacagcccaggcctaacaatcctgtgtgtgggaagtagaactgacccccaacacccagaggtcatggggaatcactcacgatgtacgctgaactggccagttacttcttcactcataagatttagctttatgacttgtagggtgtaggatcctgtgtcatttctggtgacgttccgcatcagcagggatgcattggggtatattgtctctcgattgctgtatgcaggccctggggtaatctgttgatttgatattacatatcctataattcgacggttggcatccactgtttcccctttgtaccagttgtagccacgagggtcctggggcagattgtggacaagtagaagaacctccttcccctctgcagcattggatggcacagcttcaatagtgagctgagcagtggtgggcgggttccagaaggtgaaaagtgaggctaggagggggagagagcatcaagcaatattgcaacatatgtattggagtagaaaaatggggacatcagctttggagtttgtgtgtttttatgtgtgtgtatgtgtgtgtgtcctactgagtcaatgtcagcagcacagcccccatttcttcaacacctctgaccttggcatttccctggtggaatcctcttcttcagggttctgcacggctccctccacactgccctcagatcctgctcacatcagggcatccttgggagaccctttctctgacacctcctctagagacactgggtcttccctttctgacctttccctgctgtgttccttccagggctcctgtcagcgcctgacctcacattctagatctctttgtctgtcttcctccccaggagagtgtgagctctgtgagggcagggacttgtgtggtgttggctgcaccccagtgcctgggacaggcttcagactcctgtggatgagttcctgagcattccctgggccctctgcttcctgaggcttatttgccaatgtctgacattgttggctgaggacaatgtttcataccctggttatgctttatttgaagtgtcatctggtatggttattattatcatttttcaaaatgtagtggccagtgatgattaaccaggaatatggaacacttgagatgttcctgcctcttaccaattccagttcaatgtgattttcctgttgtgaccccttcccctctcttgtgtcctctcctctattaaggctccaacagaagtcctctgtcccctctcagagccccgtcctccccaggagaccccagccagtcactgtgtttcctcctcctgtcctttcccaggaagtcctctcctcacctgtgagcaggagcccctgccaggggatgcgccatctgcaggaaggggctgagatgggccccatggtctctgctgcctgcgtgttctcctctgtggagatgagcctgggatccagaaactttctgagcacggctgtcagctgtgctgtccttcctccttttgtgctgagcctcttcccggggcaggagcacttctcaggctcatgggcggggtctgtgcccaggacacctctctgtcccctcccctctcagtcctgcctccctgtccctcctttccctttattttctgtctgtgtttcaggcccctgggaattgctgaggtctctgactccttcagcagtgattctctcacccaacctctgcacacactatgcagacacacacacacagagacacacacatacacaaagagacacacacagtcacacatacaccctggagactgggtgagcacagccctgtgccctcagcatcctgcagcctatgtctccaggtcggggtgcacagtcgctccccctgccctctcccatccccatctggctcttcccttcagatcaggaggtcagcgctccgcaaggaccctgtcacagggacaccaccactgagctttggggaggtgtgtgctcactggtgagagggatcctccccctctctcattgtgtcaagcttggttgcagcttccaaggatggacattcaatgccctggatatcccagaggggactgtccttactggtggtgtgcagggcaaataatctcttatgcctcctgagagagagggctgttctggttggtcagtgggggctgtgggcctagtggtcatcagggacaggtatcagccattctcttgctctttgggttctggcagctgagctggggctcgggccttccatgttctctctgaccatcttgggtgtcctctgttttcgcccggctgactgtcctgtggtcaccccaccttccctatggttggtgcagcaggaagtggggagttgcccaggggccccacaagacagtgctctctgagatccaggagagggagcctgggacagagcaggggctcagagctggagagactcatcccaacttactctgcagccaggatgggctcagccctccccatgctgatatcccctggggtctgtcctaagggtttggacctggtcaggcccctctgtgtagagaaaggatgggcagcggccggggagcccgtctggggggacgttgctcacacctgagagggcaggtaggggtgggccatgttctgggaacaaagggagctcattccttgccccccagcttgtgtacatgagagagcgctgtcctccctcctggcttcacgaaggacagcagggggcaggtggctacatcccagacagtgcctgggcgtgaccatcacatactctccgagcctcctggggtgcagagggaaggtcatagggtgcctggctgattccccagaggcactgtgggccctcaggcagctgtggttctgtcagcgctgggctcagcctgccatgccgtagagaacaggacacacggagcaggggcgggtatttagggagcagtcacagaaagagttgatgaggatggagggaggtcacgaggggaaagcgcccagtgtggcatcccgtgcaccagcgctgccctgggagatgccttaactaggcccagggaaggattgggtgtgtggggcaggagctgcctgcagagggggcggcctcatgttgccggctgcctggctgcagggaggagctgacagagtccgtatggggagcttggagggtaaggaggacgtgggccgaggtgccctggtgagggtggaccctgctgggctgtgggttccgctgagggaggtcagcagcccctgggaaggctccaggctggagggactctgtcgccctctggtggactggaagggaagtgtgggtggccgcagtcccaggtccggctgcgtgttttattccacatggatctgcacatttcacacgaggtcacccacatgttatgtcgagctccatcacattccacatccgtgtttttctctgtggctgattctctggtgtgatctctgagcctgtgttagtcctcctcacaatggtcacagctgtgtgtggagatctaatggggtgtgtgtggctcatgtgctcacacagagtgtcctggggtcaggctttatgacctaccctgccccaactccacaacaagatctgaataatgcgccaagtaagataaagtcagaatccatgggggagggtgagagtcctggcagtgctgaggtctgtgtctccagcttaactctcagtctctttgcaaatacatttatgttgtgcatctgcagttggctgggcagtttcatgtctctgaatccttgaatctctctgtggataaggtcatgtagggactgcatgtaagtgtatgagggctatctgattagggtgggtatgttttacgtagtaggttttcttcaccaaagacttttcaaaaaattgtggtagagtgtatatatgtacattcatatatcacctccacttcctgagttcaagcgattctcctgcctcagcctcccaagtagctgggactacaagcgtgcaccaccatgccgggctaatttttgtatttttagtagaggtggggtttcaccatgctggccaggctggtctcaaactcctgaacttgtgatctacctgcctcagcctcccaaagtgctgggattacaggcatgagccactgcacccggcctgtatatcttctttgaagaaatgtctatttgagtttttgcccatttataaacggggtggtttgtctttttgttattgagttgtagcagttctttatatattctggacaggaagctcttctatatgtaatttgcaaattttttctcccattctgtgcctggtcttttcactttcttcataatgtcctttgatgcacaaaaggcttgcatcttcataaggcttaatttatctctttttccttgttgttgctcatgcttttgtgtcatatctaacaatccattaccacattcgaagtcatcaagatctacccctctttttctttttttaaaaaatatatattttatttacataggttttttggggaaccgattggtatttggttacatgagtaagttctttagtggtgatttttgagattttggtgcacccatcacccaagcagtatacactgaacccaatttgtagtattttttccctcactcccttcccaccctttttacctgagtccccaaaatccattttgtaattcttatgcctttacatcctcatcacttagctcccacttatgaatgagaacatacgatgtttggttttccattcctgagtcacttcacttagaataatagtcttcaatcccatccaggttgctgaggatgccattaattcattcctttttatggctgagtagtattccatcatacacacacacacacacacacacacacacacacacacacacacatatatatacataccaagtttctttatccactcattgattgatggacatttttgttggttccacatttttgcaattgcaaattgtgctgctataaacatgcatgtgcaagtatctttttgtataatgacttcttttcttctgggtagataccaaaagtgggattgctggatcaaatggtagttctacttttagttctttaaggaatctccacactggtttccataatggttgcactagtttacattcccaccagcagtgtagaagtgttcccttttcacaacattcataccaacatctattattttttattatggccatcgttgcaggagaaaggtggtattgcattgtggttttgatttgcattccctgattattagtgatgttgagtatttttatatgtttattggccatttatatatctttcttcaagaattgtctatgcatgtcctttgcccactttttgatgggattgtttgtttgttttttccttgctaatttgattgagttcattatagattctagatattagtcctttgtcagatgtatagattgtgaagattttctcccactctgtggggtgtctgtttactctgctgactgttccttttgtcgtgcaaatgctctttagtttaattaagtcccagctatttatctttgtttttattgcatttgcttttgggttgtcatgaactctttcctaagccaatgtctagaagggtttttctgatgttatcttctataatttttatagtttcaggtcttagatttaagtccttatcaatcttgagttgatttttgtataaggtgagagatgaggatccactttcattcttctacatgtggcttgtcaattattccagcaccatttgttgaatagggtgtcatttttccacactatgtttttgtttgctttgtcaaagatcagttgactgtaagtatttgggtttgtttctgggttctctgttctgttctattgtttcatctgcctatttttatactagtaccatgctgttttggtgactatggctttatagtatagtttggaatcaggtaatgtgatgcctccagatttgttctttttgcttagtcttgctttggctgtgtgggctctttttggttctatgtgaattttagaatttttttttctagttctgtgaagaataatggtggtattttgatgggaattgcattggatttgtagattgcttttggcagtatggtcattttcacaatattgattctacccatccatgagcatgggatgtatttccatttgtttgtgtcatctctgatttatttcaggagtgttttgtagttttccttgtagagatcttttaccaccttggttaggtatattgctaagtatttttttccagtattgtaaaaggagttgagttcttgatttgattctcagcctggtcactgttggtgtataggagaactccatcacattccagacccatgagtccgtctctgtgattgcaagttcactgccctgcctctttcacagtcagatgttccaaatgcagattttgtgtcaccttctgtgagtttgtgtttgtgtgcagtaggttgtactgtgtatgcccggggtgcaatgatgccttgagctgagcactgggcaggggtttgggagcagaagagggaggtgcagggcgggaatatcaatgttaggggagcagggggagcagggacaaatcatcttcatttcttgttgtcagggacaaattctggggcacagcacctggttctggggcacagcaacccactgtttgtgttcctgggtgttgtgagtgctcataatttcatgtgtccttggcatccatttcttaaggtgtaagcttaactgcctcatatcagaggcaggacttggtcaccatgacagtttccaatactgtacccggtcaaaaaggctccagttggtggccagagataaaatcttagaggcatctctcctgggctcccctccctccagctgcttcctttaaactgatcattctgacatttgtcctcaaatttaaagtgaccacctctcagtcacagtatgatctccttgacccagtgttcacttgttttaaacctgtccattaaagctccctgttgtaaacctgtcggataactctgtggacccagtaaagccactggcttacaggactcttctctcctccctccctgggctccctgacctctgtgtctgtggtctccaggtgtgctgtgtgctcccccatgtctgtaagtagtaaaactcttacactttattttattattattatttctaattttttgagacagagtctctttctgtcacccaggctggaatgcagcggtacaatctctgctcatggcaacctctgcctcctgggttcatttttgcctcagcctcgcgagtagctgggattacaggcttgtgccaccatgtctggctaattttttgtatttttagtggagatggagtttcattgtggtggccaggcgggtttcaaactactgacctcaggtaatccacctgcctcttaaagtgttgggattacagacatgagccagtacacctgtccagaactcttacacttttacattgtggttgtgtcactcactgaagcctcacctgccatctggggcctgacatcgaggctgacccaagggacccatgcaggttgagcccctgctggagtgcttttcttgaggccttggtgctgctggggacaggagctgccagctaatttgatagagaacctgaagagtttcactcaaaaccctgggctagatgatgtatttctgggcttgggctgctataacaaacaccatagcctgggtgacttaaacaatagagatctatttctcatcgttatggaggctgggaaatccaaggtcaaggagacaggtgactcagccctggtgagggcttccttgcagatgcctactttctttgtgtatctgcacatggtgcgggtttttgaaggggtggagagacagagcgagggagaaggagagatgccattctcttgtattttccttttattataaggggattaattccatcatgaagcccccagctttatgacctagtcattctctaattacctcctaaagaccccacctccaaattccatttcattaaggatgagagtttcaacaattttgtgggggacacattaagtttcttttttcttttttttgagatggagcctcactctgtcatccaggctaaagtacagcggcatgatcttggctcactgccacctctgtctcccaggttcaagtgattctcctccctcagcatccccagtagctaggattacaggcatgcactaccacgccttggctaatttttgtatttttagtagagatggggtctccccatgttggccaggttggtctcaaacttctgacctcaaatgagccacttgccttggtctcccaaagtgctgggattacaggctgacttattcagtttctagcaggggaggtgagagctgctttccctcctgttcatgggacctggccttttctgctgagatggcttcacactcataatctcaccctaggctgcagacccacagagcctgtgtcctcgactcctctcctgcccattcctgggtattccttcctgcaccacgttctccgtgtggccccacctgctctcgttccagggagctgcccctgggttgctgcccctctcaccatctttgggctcactggcctctgccatttcttctgagccctgaacactgatccctggcagggaggaagtgtgaagctggaatgggtgctgtccaaggtgctgctctctgtggacagtttgacagtgagggaacctgatgtgtcaccccagaggaggcccaaaagctgtttctcaggggtgcctggattgtagtggggtgggtacattagagtgggctggaccatggactgcagggaacctgttctgtgtcagcgaccagctcctcaagctccatgttattctctgtaactgactgccttgtgtgctccctgagcccaagatagattccttcccacaatgtccagagagtcagagctgtgtttggagacctaatggggggtcttgtgtgcttacacagagtgtccagagaacaggcttcatgacctcccctgccccacccccacatcaaggtctggatagtgggccaggtcagataaagtcagaatccatggggagggtgttgtcctggcagtgctgaggtctgtgcccccagcttaattctcagtctctttgcaaatacatttaagttgtgcatctgcagttggctgggcagcctcatgtctccaaattcttggatctccctctggataaagtcatgaagggtttgcatataagtatatgagggctatctgatcagggtgggttttacatatacatatatgatacatatttacaaatatgcataatacatttattatgtattatgccattttaaccactttaaaatgtgcaatcaaatggaattaaccaccatcaccactatctttcctagaaatttctcatcattccaaactgaaacgctttatctttttttttttgttttgttttgaaacaaagtctctctctattgcccaggctggagtgcagtggcgcgatctcggctcactactacctctgcctcctgggttcaagcgattctcctgcctcagcctccagagtagctgggattacaggcgtgtgccaccacgcccagctaatttttttgtatttttagtagagatggggtttgaactgttttggccaggctggtctcaaactcctgaccttgtagtctgcctgcttcggcctcccaaagttctgggattacaggcttgagccaccgcgcccggccaaccgtgtatcttttaaacaataacttccgattttgtccaccctagacctcggtaatctctagtctgctttctgtctctatgaatttgcctattcttgatgtttcatataagtggtgtcatacacatatgtcattttgtttctggcatatttcaatagcataatgtttccgaggtccatccatgttccagtgtgcgtcagagttttgttcttctttatagctgattaacttgctgttgtatgtatcgccatatttgtttatctattcatgtgttgatggacacttgggttgtttctatattttatctattgtgaatagtgctgcaatcaacattcccattcaagtacttctttgagtctctggattcaattttttgggtatatacctaggaaaggatgttgttttatatgggaagtctatgattagctctttgaggaagagcacaactgtttctcatagtggctgtacctttttgtattctcaccagcaatgtataaggattctaaattctacataagtctcccacttgttatttaacattttaaaagaatggtaactattcccctaatgactaatgaagttgagggtcttttcatgtcctcaactatttgtatatcttctttgaataaatgtctatttgagtccttttcccatttataaattgggaggtttgtctttttgttattgagttgtagcagttatttatatattctggacatgaaacccttgtctataagatttgcaatttttttctcccattctgtgtctggtcttttcactttctggataatgtccattgatataaaaaatacttgcatcttgataaagcccaatttatctatttttcatttttgtgtctcctgcattcatgtcatatctaagaatttattgtcacatttgaggtcatcacgattcacccctacatcttttctaagacatttttatggttttagcttttatatttaagtcactgatcaattttgaggtaattgtatgatatggtgggatgaagagttccataagttgtttttcatgtggttatccagttgtccctaaaccattatttgagaagactattcataccccattaaattatcttgacactcttgttaaggagcaattgaccataagtatgagggtttatttccggactctgagttctatcccattggtctctgtgtgtatccttatgccagtagcacacccttttaataattgtactgttcatgagatttcaaataagaaagtacaagtcctccaatttattttggcaagattgttttggctatttaggggtacttttttttttttttttgaaaaacaactaggtcaatggttcacaattggggaaggcttttctctttcctcctggagggaatttggctgtctagagacctttttaggaacctaatctaaatagataaattatccccacttcccttgctgaggtgttgtgttaaagtgtgcattgcctcctgtggaaaaattgagagatcctggaagcacttggccatgtggtgagggacagcaagttccatgatgatgggcagagacgacatcgtttggaacacagtgttgttggaggagctgtatgcatctctacttctttatttctctgtacaacccacatctccaccagacacagtagatattaaaatcattgtttatcctctggtgcacggatcttggctgacctgtcagcaggagctagaagtgatacctggcaaggcaggggaggagcagggctcagcagggtgaaagcagctgggacccagagaagccagaaaggtctgactcttagaaactaggggccaggaagtgggtgtcctcaggggcaaatggatcacagtggtacccattgcagtggactggaagaaggtaagagacactgggtatcctatgtcctctcttagctccctaactgaagatttggggcctgggctggttgtgtcctgtagcaggcagcgggtagacagggatggctgcatatcaggccacagtctatgtcatcttgtcaggcattgtcactgcagatggagaattctgttcagatgcctggcctgggcacatgtaagggaccaccttattcttttaaaattattttaagaaaacaatatcagcaaatgtgatcaatgtttatttttctagaatcattattaatgtcatgttttacaacatgtctcttagggaaatggtgagaaccgtgaacacaatgtgtgttttaagtggactctcctataatttcaacttttatacattcttatagaaactattttctctgtgaacacaaaggtaatatccctgtgttcatttctacttggaactctgtattcagggtggagcgagttacatttccccataaaagatggaaagcatttgactaccagaaaaagtgtctaaaagctgctggtaatgattatagggctgcaggtggaggtcagttcaagagaggtgagggaaactaatgttgagtactttttctcaaaataatgtgcagaaggaacaaccttggcccacctcatgttgggatgaatgagggacagaaatagaggtcagtaatttaaagatcaaattcaagagtgggcaacaggtttgagattggaatgggtgtgagaggtggacggatgaatggtgaagatgttcaaaacaccttcctaccccatattgagcccctgaggttgagacagtgtccagagcaggggcagcagaatgctgtgagctcacagggctggcatgagactttagcacagtctagctactacgtctattttgggatggattcatatttaaggaataatctaacagtatacaattttgaaaatatatagaaattcctttgctatgaatttcttcttcataagatatttcttcttaatgagagaattgatttttttttgagatggagtcgcaatctgtcacccaggctggagtacagtggcatgatctcgactcattgtaacctccacctcctgagttcaagcgattctcctgcctcagcctcctgagtagctgggattataggcatacaccaccaagccaggctaatttttgtatttttagtaaagacagggtttcaccatggtgatcaggctgatctcgaacttctgacctcgtgatccgcctgccttggcctctcaaagtgctgggattacaggcatgagtgaggtggactgtagaccctttcgatttgtggttacagacccttggaaaagcctcacgcttcctgctgtgaggtacaggtagtcatgtggcatcacctctaaacgtgtcttctcctgagacatcaagtttctgattaagtcaaaatcatttcaacagatattgaagatgtcagttttactctcacactcacaattcttctaccaagagatgaaagattttactggtgacttgtttgtagatattaagatagatcagtgatttggacgggaaattttgccctccagggggcatctggcaatgtccggagacattgttggttgtcagagctgggggagagcccacaaatggtgctgaacatcctagagctcacagacagccccaccagcatgaccaccccaaatgtcattgctgaggagtggagagccctgcggtgcccttcctcagcttccctggggcttcctctcacctgcttctcccatctctcccgaccactccttcacctcagttccatcgttgcccaacagtcctctccacctgaacttgctcttagtccaaggccagccctgatctctcaactctcctggcttccttttgctccttagcaggaggtgcccactagagggcgcactcgcccttcccggcactcaggctctacctttcctttctaagacaagcgtggctggcacaatcccagccctcaacagtctttaggtttgctcacggggcagctcttggacaggcatcaggaaccccagggaggagcctgactctggagatttttgtgcatggactggggacccggagccaccccagggcccaagtcactggggaggggctgggtccgtgcacggggccgcacactcagggtccagacactcctgccctgtgtgggtgctggggacatggccatgcgcctgtgtccctaaagcctctgtcactcaggatttgtgcctgaggaccttggctgggctgctgtgtaaacttccagatggagcctttcccagtggggcacgagtcctcccagagatttcaaggagggccttcaccaggaagaatcaggaggaatgtgacagccaccagggtgtagtttccctccagggcctgaaaagaggcacctctcttcatcatttgcccagagtatttgtactgtctccatcatgatggaatgatgccattttgcttctgttctgctaataataattttgtttctagctaatctgttgatgtagtaaaaacaattgttaacgttgctatgttaaagtgtggcattttaacatgatgttaaaacactatgttaaaccttgcatttctggggaagcaactcaaggtggtaaattctgactcattttggtcgtacttcatttgtggattttccgtctttgtttctgagtagggcctgcaattttactttttcattgtttcctggttggcctttgataagaaggttctacttccacaaaaatgagttaatgagtattgtttattttctttttctctggaagtgttgtgtaaggttgataggagctggtctttgattgttttgtagattttaaaaatttaaactgaagagattttatacttcttgtttggtgaagtaacatggacatagcataatgtctgcatgtttgtgtgtgccaatgacagccctgtccagatcaagacagagcacattgtctgcaccaagcgacactcctgcgcccctcccagccactgcaagcaccaggtcactgtcattctgatctctatcaccagagatgagttttgcctcttgggaactttatagctgtagaatcaggcttcattttcccttctgcattggctcctttcttgcaactagttgtgtgagatcatgcatgttttatgtagcaggaatccatttattttcatgttgtaaattatccattagtttgaatacaccacagttttatcccctgtattgttgcacatttggactgcgacactatttgggtcttctgaatcatgctgatgtggacgtttctacacacatattttggtggccttactcatttccttgggtgtagagaccattgcatatgctggaacttctaagattgtagattttcctgttagagagttgatcacatctaaattcccaccagcaacatctccgtgtccagttgttccaactcttgttattggcagtcgattgaattttagcctttcttatgttgttgggatgagatttcataatggttttaatatgcctttcctaaataaacaacagtgtaaatgcatcttttcatgtcgtcatgggccattacacatgttctaccatctggtgcctcttagagttttctgccatttaaaaacattgtgttgtcagtctttctcttattgttattttgttatgtaccttgggtgtggcttctttgtcatttagatagatacacatgtctgtatacgtcttgtgtatgtaggagagagggaaaattgggagccttttgaagaacagacattctcaatgtcaatgaattttatctgttgttaaaagattgtcatgtcatgtgaattagagatgtagatttatctttttttctctgtagagatattcatggtcatctcaaatcatctgctttttgtgagtatgcacacgtgtgcatatgtttgcatgtgtgcaaatattgtaattattaagtaagattttaagatgggtggctgggcattgtggctcatccctgtaatcccagcactttgggaggctgaggcaggatttgagcctaggtggtgcagaccagcctgggcaacatgatgaatccctgtctctattaaaaatataaaaaattagccaggcatgatggcatgcccctgtagtcccacccagctttgctcacttcttataaggaagatgagtttcctgttcctgtgacaatggagaacagccttcagcttggtttcctctcagctaaggagctggtttggggttttgttttagaatttggtagttgtaggttaagggttaaggtttcttgatacttggctctaacctctccttatgcctagagtgttcaacagtatgtaatttgtgcaattgctttttgtgattttggtttttatcattcttcttttggatttaaccaacccttcaccgtgtctagagtttaaaacaccttccaagttggtcaaatccaacaggagctccacattatgatgaaccaggcctctaaaatggaaaaaccccaactgcataacatcaaattttagctctagaaacacctgctggttgaaggaaataaaaatattttaacccaaagtatagtagtatagttccttgacaaattttgaggtggctgatagagggtcagcaaacagaagtggccctgcagagctgtctctcatgggaaaatttacatctgtagagaatctttattaatgcaggcaggtcttcctttatctggatctgggaaaattcttttttttttttttttattgatcattcttgggtgtttctcgcagagggggatttggcagggtcataggacaatagtggagggaaggtcagcagataaacaagtgaacaaaggtctctggttttcctaggcagaggaccctgcagccttccgcagtgtttgtgtccctgggtacttgagattagggagtggtgatgattcttaacgagcaagccgccttcaagcatctgtttaacaaagcacatcttgcaccgcccttaatccatttaaccctgagtggacacagcacatgtttcagagagcacagggttgggggtaaggttaccgatcaacaggatcccaaggcagaagaatttttcttagtacagaacaaaatgaaaagtctcccatgtctacttctttctacacagacacggcaaccatccgatttctcaatcttttccccacctttcccccctttctattccacaaaaccgccattgtcatcccggcccgttctcaatgagctgttgggtacacctcccagacggggtggctggccgggcagaggggcccctcacttcccagtaggggcggccgggcagaggcgcccctcacctcccggatggggcggctggccgggcggggggctgacccccctcacctccctcccggacggggcggctggccgggcggggggctgaccccccacctccctcccggacggggtggctggccgggcggggggctgacccccccacctccctcctggacggggcggctggccgggcggggggctgacccccccacctccctcccagatggggtggctggcctggcgggggctgacccccacctccctcccggatggggtggctgccgggcggagatgctcctcacttcccagacggggcggctgctgggcggaggggctcctcacttctcagacggggtggccgggcagagatgctcctcacgtcccagacggggtcgcggtggggcagaggcgctcctcacatcccagacggggtggcggggcagaggtgctccccacatctcagatgatgggcggccaggcagaggcgctcctcacttcctagatgggatggcggccgggcagagacgctcctcactttccagactgggcagccaggcagaggggctcctcacgtcccagacgatgggcggctgggcagagacgctcttcacttcccagacggggtggcggccgggcagaggctgcattctcggcactttgggaggccaaggcaggcggctgggaggtggaggttgtagcgagccgcgatcacgccactgcactccagcctgggcaccattgagcactgagtgaaccagactccttctgcaatcccggcacctcgggaggccgaggctggcggatcactcgcggttaggagctggagaccagcccggccaacacagcgaaaccccgtctccaccaaaaaagtacgaaaaccagtcaggcctggcggtgcgtgcctgtaatcgcaggcactcggcaggctgaggcaggagaatcaggcagggaggttgcagtgagccgagatggcagcagtacagtccagcttcggctgggcatcagagggagaccgtggaaagagagggagagggagaccatggggagagggagagggagagggagaggccaactgaatcttctaacttatatatcaaaaagaaatatttaccatccattctctaggagggctgccacctacaaggtttcatttacataacaagaccagctttgctagaaaaaaacagtttttctttcatctataacttgtcttgccactgaaacctgatttaccatcataacctgtttttggccatgcaggaatgcaagaaaataatcagccagcaaaacagtaagaatttattacactcaaggctgctggcttctgtccgtgcaatctttttaatcagatggtaaaaatcagcgtttcttccactacattttgattaatgggaatggaagatttgtttatgactagtcttcatgtagtgactctggtatactttttagtaatttttgggtgtgaatattcatattgtttaatcccttttttcccagaggtagtcttgctaactaagctctgatctttttatcttgcccaaattcctatctaagtggtctgggaagtcataccctacaaaccataaattctcagcagatgggtttcatttaaccctaaatatcatgacttactttccagtctgactctggcataacattatgtgacaaagaagatcaaaatattttaccccaaaacatgtttctttgccatgttttgaaatggtcctgcaaagctgtcctttgtggaggaaaatgtgcatctgtaaagaatctctgttaacatagctaggtcttcttcttccaggccctcccaatcctgaagaaattcggtaagagcctaccacctttttgaaggtctgaataggaaacatttgtcatctgctgtctctaagggcagccactataagacttcaaaagaaccttggtctccacaattttttatctcaacctgaacatttcctttctattgatccaaggtatttagacaaactcaaccaactgtccatcagaaaatgtttaaatttacttgtagcctggaagtccccactttgaattgtcccacctttctgaaccaaaccaatatatttcttaaatgtatttgattgatgtctcatgcctccctaaaatgtatagaaccaagccgcaccccgaccaccttgggcacaggttctcaggacctactgagggctgggtcacgggccatggtcactcatatttggctcagactaaatctcctcaaatactttacagagtttggctcttttcgtcgacagtcttttccttcatctcttttcttctgtgttgttcatgaagtggggtactggataaagtttccttgtcatattccttgtctcatcttgtcatatgcccttgagggcttgatttgtgaccaagtgggagcactcattcttggtctccattatcagcagtgtgtgatttttgagtcacattaggtgaccagccttaaaatggttgggaacccgagattttttgttttgttttgtttgttccaaatgtgtcaagctcccaggagggcttgtcataagaagtcccatccataaggggcttttgtcattccaacttctgttgtctggatagggctgtggcaacaagagtcttttgctatcctagcctattgctgggagtgaatattttattttgttggggttgggggaaagacctctacaattgcttcttcattgaagagggctattgacttgagggctatttagaatcaatataccactggaaattctaattgtctatggccagaagatggattcctgaaatcagactcctatgttaaaagtattttagagatctcttattctaaacagttggtaggaggatcaaatttcaaagaaagacacgtaatcgtgttctggctagccttaaaaattctcttgactaaatttcagagcaaaaatctgacctaaaacaaagttaaatttttttgtaagctcaaactgcttgctttagatcccctgagggagtaagaataaaagccactccaatattccatttcatggaatagttaaaattccatgctttcactcctgacctggattttgtttcaagtcaaggaaccagcctcttttgttttgatatttatgtgatttttgactttttaaggtactcatttacctctttggagatgcctcatacatccttggctaagtcttggctaagtcgtaatcttgattaaggcttattagtttcagatgggaggatacttttggtaaaaaagtttcaaaaaccagaagtttcacctgtttgtcctagctaaaatctgatagtaagaaatctgaaagtgttacatgtatttagtcagacatgagcagggcaggagagagcctcccgtcccccgcatcaggactatcaggtgactattaggtgatggtcaggcagttgttaactgtctttctaaaataataattggccacagccagtgccagaaaaaggcagtctcccaatacataggaaacacctgaaactggtgattagcagcttcccgataagttctcagaagttgggtgagtgggctcaagcatgtgcattaagaggcaaaattgcagagtttaattggtatatgaccttccagggacctttgactggtaagggaagaaagcctcaagtgatcatgcgcacagctccagtaaacacactgcacatgctcctctccgaagtgctggcaggccactgtgcgtgccgacagcccactccaaggaaagaatcaggggaggagagatgcagaccccagaattagtccaacatacaaaagcctaagtcaaatgtcaaacctcatacttgatctcttgtcacctgcttagccctcttttaagcgtactttacttcctttaatttctgctctaaacctttttaataaaacttcactcctgctataaaagttgcctcagtctctgcttctgccttatgccccttagtcaaattctttcttctgaagaggcaagaattgaggttgctataggcttgtacagatttgctgctgctaatattctttggtgccatgactcagctacatttggctgctaagcaaagaatttttaaaaagagctctattgttaaaagtcagcttaattaaaagctgattttcaagccatatatttattttatattaaatatatatcttcatatagaatatatattcctatagaatatatataggatatgtagatattcctatagaatgtatgtataggatatatagatattcctatagaatgtatgtataggatatagatattcctatagaatatataggatatatatattcatattgtatatacattcagaaagggcttgaaggcctcaaggcctttctgcttttcttttttgtatctttaaaagtttttttccagttgactgaaatctttcaaaatcatatacttagtctctctgtttctttctcaaggattctttttcagttcctttctgttcctcctttcttttgctacccttgatgctacatgaggggacctaaagaatttctaacagcctggtaccccttaaagaaaacagaaaagatgccacagactcccctgtttggaaagaaccacagtttttcctcatggaatcccaagagttgtaagtgaatggattcctctcaggtctaaaactctgctctcttttcaactgtgttgactgacctttttggcttctgggggatcagagtttactttttgttttcctttttttttttttttaatgagatggagtctctctctgtcgcccaggctggagtgcaatggcacgatctcagctcactgagacctctgcctctcaggttcaagcgattctcctgcctcagcctcccaagtagctgggactacaggcacatgccaccacacccggctaatttttgtgtttttagtgtatttttagtagagacagggtttcaccatgttggtcaggctggtctcaaacttctgacctcatgatccgcccaactcagcctcccaaagtgctgggattacagacttgagccactgtgcccggctcagagtttactttgtactgtaaaaagactcgaccttccttgtgtaatggctgctgggtcagtggtaagagctatggtttttgaggtaactaacagtggttagtcagtgattattacttcagagggctactcatctctttgcatgtttagataagaaagacatggtttaaacaactagaaaaagtccattttggcaaagtacactatggaagtgtttcacagtatgatccccatggcatattcctcttcttagggacgcgggattcagtgaaatccttgagttttaaaagtctagatgctgtcccttacaactgggtctccctttacacattgaaattattaagatctaaaaattacaaatacttcgttggccctcttctttaatgcgctcctctccaagctccctggaccagttggaaaacggagaccaaattaaaatctacatatctaaataaaatttatctccttataaaatcctatggtaaatttttatcattttggtgttaccttggcatctatttttaatcttccttgaacacacccaaattccttcttgtaaaaccttaaattctcaatctctctgtgctttgaggtatacatttgctacccattttctaaaactcagtaaagccttcctcagataaatgttaaccttttccatttacaaaggcacaatttgaattcaactgtctttttaaaaatagtgagttttactggtcccatgtttaaactcctaaaatcaaaacactaacatctgtctccctctatgtttatgtggacatgtatatatgttgtatcacatatgtgtatatgtctatacatatgtttattatttacacatggtatcaaattaatgtaaagataaatgagtactcataaattaagtaaataagctcaaatgcttttttcaatacatgtaattatagtaatcttttataaatatagttttaaaattattggtagaatgaagtagaaatgtcttaaaacaccttgaacatttaacaaccttcccaaaatcaaacttcagtttcaaaattgtcttccatggcacctggcttttcaaatatttcagatggcccctgaagtgtccaggaaagagaggtaaataggattatttgagatgtttaggtacatgggattgccaaaatgatgctcaatcttttttagattatatcttggtgaataatgctaatatatgttccaacattgtatgggatttctaaaattctaatgtctgagtatatgctatcaataataattaaggttttttttttttctttttagacggagtcttgctctgttgcccaggctggagtgcagtggcatgatcttggctcactgcaacctctgcctcctggtttaagtaattctcctgcctctacctcctgagtagctggaactacaggcacgtaccaccacgcccggctaattttttgtatttttaatagagacggggtttcactgtgttagccaggatgttgatctcctgacctcatgatccactcacctctgcctcccaaagtgctgggattacattcatgagccactgcgtgattgtgtttctaactgtaactaccctggacattttgctattcacagacaattgttatcttgttttaatccttttcaaagatggtttataatgagctatagaactttaacaggcactctcaaatacaagcttctgataactttggagatcataacattggaataaaggaaaatgtacaggactcataaagagcttaaatgttcaagaatatcaagcaaaacaagagttaactaaatgaactgaactcagaaagctgaagcaacatttgtttggaatattttgctgattcttgttttgcttttcagagtcaagaaaacttatttggaattatttacagcttttaacaattaagtaaggtatacacttctgtgatcaagatttggagcctgtttgtttctctctgcctggttcctctaaaatttggaaactatctgtgagtattcctatggcaatacagttgtttgaatcagtgcaataagaattcatttttcttttgcaacaggacacaattggagaaagtgattattttaccaaggctttgactggaaggctatgcttcccttgaaggagtcagtcttcacttggagaaccaataaaagccccaggaggagactggcctcatacccttgtttacacggtccctgtacagggttcatgacttatggtcagtaaagaatgtcactttctaacaggtccaggagttccaagtttattatgtgactttaagaggagaggatcacccaactcggggttatttaaggatgcaaacctatggctgggcttagctttaaaaggtcttatctgcaggaggctgaggcaggagaatggcatgaacccgggaggcggagcttgcagtgagccgagatcgcgccactgcactccagcctgggcgacagagcacaactctgtctcaaaaaaaaaaaaaaaaaaaagtctcatctgagattccttggggaacagagttccatcaaaatcaatccaaaaggcctatgtagaaataattattcttggccaggtacagtggctcacgcctgtaatcccagcactttgggaggccaaggcgtgtggatcatgaggtcaggagatcaagaccatcctggctaacacggtgaaacactgtctctactaaaaatacaaaaaattagctgggcatagtggcatgcgcctgtagtcccagctgctcaggaggctgaggcaggtgaatcgcttgaacccaggaggcggaggttgcagtgagtcgagatcgcgccactgcactccagcctgggtgacagagcgagactccatctcaaaaaacaaaaaaaaaaaaagaaaaaaagaaaaagaaatacttattcttgaaataaaagcttaacaaggttttcctgaggtgctaatctgttctttggcaaaatttctaaagggttataaaaggcttttgcttctttaaaatttatgagtcatcatttttggcaaaataaataacatagtaatctggaattctatttcataataacataatgaatatttcataaaatcttattaatcaagtattatgaatatcataatatttcataaaatcacacaggaagcattgtcacatatgaaatggtgttttgctttctttgggctatatttgtataaatatgttattggtatgtgttctaaagttatggaagactcctataattctgatatatcttagtgtacattataagtaataattattattgttatgttaaattattgtgtgacacagagttaacagatttccttgtcagttgtgtctttaactatggctaccctaaaactttttgtcatccacaaacagttgtcttgttttggtcctctttaaaaggtgattttataatcagctataaaggtctaacaggtgctcttgaatgcaggtttctgataagtttggagataagatggtgacatcagaatagaggaaaaacgttcagaactcttgaagagctaaaatgttcattaatatcaagcaggacaggaattaactgcgtgaactgaaataatagcagactggagtgatctttttaatgttttgctgaaaacattgctaatcctttgttttgctgttcagagtcaaagaaacttctcttttaagctattgacagtttttaacaatttagcatactcccatgaataaaatttggagcatatttgtttctctctacctgattttctcaataatttggaaactatctctgagtattcttaagttatggcaatatagttatttgcataagtgcaataagaatctgtcttcttttgtaacaggacacaattggaaaaactggttatttttaccaaggctttgactggaatggtagattcctttaagtaatcaaacttgacttcataggtggggctcgagcgttcattttgaaaaatgtttctgagtgattccaatgtgtagctatatttcccatcagatttatctgaatttttgtggcattcgctcctttcttttttggtattataattatttttcaggtcttatctcctctcttgggttttatgttccctggggtagggaccttgccttcttcatttctgtatctttcatgaacacatgaattggtcatcaggaaaaggttctcaaccacatgttggttgtgttctgagtctcagctttacacattagtgctagcgtcattgttctccatgagatcagaggttgcttgtgatgaaggttgtgggtaagtctgcagtgcagatggtggaggagagataccctgtttttgtatatagcattggaactaagaatattatttatatatggggtggagagtcagggatgtgtaggaagacagttctaattaggatggaggaattatactagggaattatactagggaatagatgaagtaaaggaagtaagaagtattagtaaagagaagaaatgagaacttatcaaattggccagagtagacccctgtagattcttgattaggtgaattaactagattttaggaaggtaatgagacagtcatatgcaaggaagatttcaaagtctggagacaagaagtcaagcaggacttcgagcagttgttgaggtttatgggaatggagagaatgacacaagtgagagatgttaaaaaaggatcaagagtctttggcaatgtactgaatctgagaaatgaatgagtggaggctggggataattacatttaaaagacagtgggggtacagggagcataaagaccagggagaagacctacaggaattagtgctgagaaacaagattggtggaaggaggagtagatccactcccagatacaggcaaagaagttctctccctctcccaagcatggcagtcatccttggagtaaacaggacaagaggaaaggccatcatacttgccagtcttagtgaaatgcagaaactacacctgggttgctatattagagccaccccagccagtactccagtcatgatgccgacagtgatcccagctgagaggccaggagaacttccttatcctgaagcagctgtcatggaaagaaaagaagagaataaatgaaggtgatgttattttacagtggagtgccccaggagccaactctcaggatgaagtaatttctacttgtttcttcaaggaatacattatttttgtgggaaagttgctgggaggtggttagccaactatatccttgaaatttgtcttcttctcactgtttctatgttggccatcagtcttctgtcaattctgtcctggcctttctgcactcagatatttttgaaggctttgggatatgagaaaagctgattgctattttctacatcattagaactttccaccttttcatgattgcatctttttttctcagtgtctcagtttgggcaggcatgaattagaccctgtcagatctctatggcagggacttgattgacagaaggttcaggtcagcgcattccaaattcacccactcctttgcacagagaccttgcttctcagggactcccagcaggggtatgaaagcaagcccagttctgtgagactttgttttattctcatgtgtgactggttggaggactccccatcagccttgctgaaactctcttagaactgccttgatacctaaaacttctttgtctttctccttcacaggaatcaggtctgcatcatggtctgagggctttcccaggctccttccatgcctgccccactttccctcacctgcatttttcctaataaattatcttgcatatctaatcccatcttggctgcatctcagtgggtaaaaatgaacataccaggcttgattgtttgcacttagcttttgttctttctctcccacatgtagtcagtaaccatgttctagtgttttctgtgttacctgtgcttccatatacgtatatatatgtgtgtgtgtgtgtgtgtgtgtatttacataaaataccttgtctacacacacacacacacaaacacatacacacacgcaataccttttgcatctgtttctttatttctgttgcaagcatttacttttagccctcactagtcaactcaggctggtgattaatgctatgttagttacggttgaggggcacctcctatatgccaggccctgtggtaaatactttacctgtatattatttgatttgtacaataaacctgtcaggtagacattgtttccattttacagacgaaaagctggaggcttagagtggtgaagaaactttcctgatgtcatatggctagtgaaaggcgaatctgagatttgactctaggcctcacttcaaggctaatattaatagtagtaataaagcaggtaacatttataagacatttcctctgcattttatggaaggtttcattgataattacattaaacctttagaacaatactatgaagcaagcactttcattgcaaatttcagttgaggaatcagaggctcagagaagttaaaaatcttgtacaagaaatttataactgtaaactcttacattagaaaagaagaaagatctcaaatcaacaacataatttacaacttcaggatataggagaagaacaaactaaacccagccatagtgaatgaaaaaaataataaggattagagtgaatataaataaaatggagaataaaaaaatggaagagattaatgaaaccaaaattggttcttcaaaataagatcaacaaaactgacaaccattaacttgattgactgagaaaaaagagagaagatttaaattactaaaatcggaaatgaaaatggagtctgggcatggtggctcatattttaattctagcactttcagaggtgtgtgggaggatcacttaaggccaggagttcatgaccaggctgggaaacacatgaatatccagtctgtataaaaaattcaaaacataatttgcagggcatagtggcatgcacctctagtcccagctacttgggaggctgaagaaaaaagattgcatgagcccaagaggttgaggctgtagtgacccatgattgtgcctctgcattccagcctgggctggcctatagagtgagaccctgtctctcttaggagacattactaccaattctaaagaaataatgattacaaaagtactgtgaataatgtatgccaataaattatataacctagatgaaatggacaaatttctggaaacacacaagaaaacccgagtagacatacaattagtaataagattgaaccaataaaagcatttgacaaaattcaatattctttcataataaaaacattctaactataaatggaaggaaaccacctcaacatagtaaaggtaatatgtgaaaagcccaatgctaacatcatacttaagggagaaagagtgtaagttttttctgtattatcagaaacaaggcaatgattcctgctttatctactttcattaaacatagtattgaaagtcctagtcagaaaaattagacaaggaagaaaaaagacattcacattggaaaggagtagaattatctctgtttgcagataacttgaatgtacatctagaaaactctgaagatagaaaaaaccattagaattaataaatcaattcaacaatattgcgggattcaaaatcaacgtgaaaacattagttatatttctataaactaacaataaaccatctgaaaggaaattaaaaaaaatttcaattcacattaacatcaaaaagaataaaatatttataagtttaagcaaggaggtgaaagaattctaccctgaaaactacaaaatattgctgaaagaaattaaaaatgacatcagtaaatggaaagacactttgttttcatggactagaagactcaacattgttaggaggacaatactatccaaaaacgtcagattcaaagaaatttatatcagaatcccagtaacattatttgtagaaacagaaaaatctatcctaaaattcatatggagtctcagggctctaaatagccaaacaattctgaaaatgaagagcaaaggcaaagtactcatactttctgatttcagcatttactacaaagccacagtaatcaatacagtgtgctgctggcataaaggaggacatagaaaccaatggcatagaatagagatcccagaaagaaatgcttgcatatatggccaaatgattatcaacaaggctgccaagaccattcaatggaaaaaggacagtcttttcaacaaatgatattggacaagctggatagcaatgggcaagaatgagtggaacctttatctaacaccatgtacaaaaattaacccacagtggatcaaagacctaaatgtcatagcaaaaataaaactcttagaagaaaacataggggaaaagctacatgacattggatttcacaatgattttttggttataacaacaaaagcataggcaactaaaaaaatgggtaaattggacttcatgaaaattaaaaacttttatatatcaaagaacattatcaagaaagtgaaatgaaaaggcaacccatgaagtgggaaaaatatttgtaaatcatatatctgataaggaattaatttccagaatatatgaagaactactacaaatgaacaacagcaaaaatccaaaaacccgattaaaaaatggacaaaggactaaaatagagatttctccaaggaagatatacaaatggccaataagcacatgcgaagatgctcaacatcactaatacttagggatatgcaaattaaaaccacaaggatgcaccacctcacacacattaggatagctttgataaaacaacagcaacaacaccaccaccacaaaacaagtgttttcaagtaggtgcaaaaattgaagctctattgcattgctgatggcaatgtaaaatgttatactgctgtggaaaatggtatggctgtttctcaaaaaattaaagaattaccatttgatccagcagttctgcttctggacatatacccaaagaactgaaaggaatttgaacagatatttgtacactgatgttcacagcagcatcactgacaacagccaacaggttgttgtgatgaactgaactgaaaagttaattgaaagataagtgcatagaaaactgaggtatatccatacactggaatgttattcaatcttaacaaggaatacaattcagatacgttgtgcaaaatgaaggaaccttgaagacatttatgctaagtgaaataagccagacacaaaaggacaattattagataatttcatttgtaggtggctgacgcctgtaatcccaacactttgggaggctaaggcaggcggatcacttgaggttaggagttcaagaacagcctggcccgcatgttgaaacccagtctctactaaaaatacaaaaattagccaggcatggtggtgtgtgcctataatcccagctactcaggaggcttaagcacgagaatcgcttgaacctgggaagcagaggttgtggtgagccaagattatgccactgcactcaagcctgggcgacagacccttactcttaagggtctgtcttcaaaagaaaagaaaagaaaaagatagaatagccaattacattgagacagaaagtagaatgatggttaccaagggttagggggagaaggagtgagagtttctgtttattgggtacagaggtttagtatggtgagatgaaaaagttctggaaatggatagtgtgatggttacacaacactaaattgcacacttagaaatagttaatggtaagtcttacatcgggtatacagtggctggtagtcttaccctctataaatacacactttttggtactgccctttccctcccatgcatctctgtgtgtctccaagtgtgcatcactcactgtcctctgtgctttgtcccatgtgctgtgctcacagcctcatacagccagtgacttcagaaccaggacacagctcaggagtctgccccaaggctccttttcttcccatttttctacatcctcacctaggggaaaactttgcttccactggcagctcagtttagccagattccagacaggccacctgggcaccttcttgacacaccccagccccaccccaggtagagtcagggcaaggccagtcacagctgggagcagagtctcagctactccttcctcatctgaggggctttcttctctcatttgagggaaaaatgtgagcttgtttcaagccttggatgttccctgcagctcaagtgtgggtaaaagtaaacgaaggggtgcacagaaaaggatgtgttggtaaaatagagaagaaacttgaccttgaggaccctccttcttccctctctgtaaagctccttccactacattgggcttggggctgatgaagcctccttcctacgtttctcaggctggacctgagttcatccgtgagaaatcagtaaaacaaaaggaagagtctgtagagatgaattgggaggggtcaggagaaaaatttgggatttgcttgtgcccatgggacacaggctgggaataaaaatgttttcctggttcttctcagaaagccaaatagacttcacctgaaaacctgttgccagtgctccccttaccagtgactgtgatcttcttgatcgtgaaacacctgctgtcagtggctgagttgcgaacgaaacagatgtagattccactattctttttagtgattttggagataaagagctcttgtgctgatttttggaacttcccattaatctgccaagaatactgtgggggtgggttagaggctgtgttgcaggagaggttgaggttttcccctggatggtaataggagtaagagggggaaatgttggggtcgtctgggccatctggagcaaagaaaatagagccaaaagtcatgtcatcagagggaaggaaaagctcctggtctgtggaagagccacagtgtccctctgagccaagtcacaaccctgaagtcccagccaaacccccgctgtggtcactgagccagagtctgagaattcacctgtttctcccattacaagctgtggaccctgaggtctcccatgacaggagcagcccctccccttggattcatggtcaaggctggacctacccaggtttgcctggggcaggaagtcatggccagcctgggtgcccaggagtaaaggtctctgtacttggacctgagagggactgagaggcctggcctctggccatgtggatttgggctggcagcctgggctacagaggaacagaagatactacagaggacattcagggtgactgggtcactgtggttggcactcactagattccggatttcacattcatatgttcctgcgtccttccttgtgactctgggtagagtgagggtcctgttgtcattggacagcttcagcctgggactgaccgggaggctctgaccatttacccaccacaggtaagttgtgttctgaatctcagtttcacaggttaaggccgcagtatcctcattctccacggggttggagttgctgatggtgacgaagggcttggatagtttcgctgtgcagaaaacagaagattgccctgtgtggcaacttttatcgctccatggacactttttgatcagagttggaatttcctgtctctcagcccaattgagtccttgaaagcccatggcaggtgtgtatgtcagaaaacagatgcatggcaatctgagggctcagagaccatgaggccacctgttctgtcttagagaagcatagactttctgaagtgtaaattgagcagcagtgttgggtcatggactgacacatgaccaacagtcacagcccctggtgtctctcctggtttctccctgtccagctgactggctggcccaacttagggtcctcacctggaacgtgcagctgctgggccccttccagcttcagttctactttgccctcctaggtgtgttttctctgtgacttctctttcaagaacatcctagagatgggtgttgatagactttccattgtccttaaaccctgtggatactgggtagcctggcctggaactagatgttttcagcagaaataacacaggggagaccaggggcaagcctgaagatcagtttggtcttcaggcagtggagccacaagtcagggcagttttcctgagatgtttcatagtgactgacttgagccagtgacccctaaagatagaggagagtctaaggaatgatctagaaaaagtgaagagaacagaaaagagctggtagctttggatcagaatcacgttccctgtcctgggtccttgatgctttctctccccctgcaggtgaggaccatgtggatctttctagaaatatatgtagacattcgcaaatgcagaattgactggaggaaaaggggagcataaaatgctggaaatctggccctcatagatcatgtttatttggtggatatgagacagaaatttgggaagaagttttgcaaatgttttctctgattggacattctactctctgattccatgagtttgactaccctagggacctcatataagtggattccagagtacacttctattatgatttgtttttaataaatggggtctggagagagaaaaattatgctttaaaagaaattctatagtacatctgttgttggttgttcttgagttttattctgcagtttggaccaaatcatagattcttagtgggcttcaggttcccaaactaaagctttcaaaactttacctttaaaattgggaattgtactcttcatcctagtagtcattatttaccttatactatgctgttaacttaaatactgaaactgtaaatgagagtactaatgccttggtcatgcaagccttggagctttagcgtggctcacatgagtatgcttagacagctgcaaagtggtttcactcctctcaccttgggatcaactcccattcccactatgtcccctgtcagcaggaagccagagcaattgatgacctttttctatcttcatagcctacaccttaatcttaaagtgtcttaaaactcagaggaagggattgaagatgcctttgcaaagttatgactgaaacagtgaaagagatctaactgaatcaaccccatcttgcttctgacctttaagctgttcgtgttccttcctgggtataggcagaaccactttgggaggaacttggtttatagtttaaaacaagatgataacagctctttccccaaacaaacctccctcttgcctagggactagaatgcctttgtaggactaacaaccacaagattagaaattatggtttaggagtcacacagctggaggctacaagattttgaccctcatgtcagtgcttgaggtattttgcagaccctgcccttggtggatcagctggcaccaaccagatcaataaactggctcatctgaccttgtggcccccatgcaggaactgactcagcacaagaggacagcttcaactttccatgatttcacctctgacccaaccaatcagcactcttgactcacttgccttctcccactcaccaaattatctttaaaatctctgatgcccgaatgctcagagacttatttgagtactaataaaactctggtctcctgcacagccagttctatatgaattactctttctctactgccaatccattgtcttgataaattgtctctgtctaggcagtgggcaaggtgaacccactgggtggttacaaattgagcccatgagctttggggactgcagacctgtgcttctgactctaactccgtggtgagtcagtgtagaaactgaaaccacctttgtaaagattatgacagtgagagcaagctagcatggctgactccatctagcctctagcttcaggctggccatcctcattaattcccaggcataggccaggctaaccatgggaagaatttgtagtttaactttgaagcaatgatgataatagtcccccttaaaatttaccccctccttgctcagggactgcctttgtaaaactaatgaaagaccatgagattaagattattggagggtcccaaattttgctaaaatgtaggcatagtttctgcaattccttactgctcaggactcatgtgtacagaggtcacaagatttatgacttccttaattgcttctatagataacatcactattgtagaacctgagattggtcttttaagatgttcctcagacttttgcattttggcaaccagcataactcatccagacccatgattaatgattcatccattcatgtggcttccatccagaggcagatttaacacaaacagatcattttccccacctgcatgatttcatccccaaccagtcagcagtactcattccttagacctctgcagctgaaactatccttgaaaacctctaatttctgagccactagagaggctaatttgtacaataataaacttctgtcctcctgtttgacagtctttgcctaactaaaatcttttgtaactgcaagtcaccatctcagtaaattggttttgtctgtgcagggtgcaagaggaacccatcaggtgattataagagtggactgaggagttgctcatttctttccagtggcttgtttcatgttttggctcacggaggaagagaaccctggatggggacacagtggaagcttgttctcctggtgatctggggatattggctcatgatggagcctggcaggggtgactgctctggctgatttctgtgcctttcctattgtccaggaggtgggccaggctacagtgtgaataggaagggaacagaacagtcagccttgttagagggagtgtctggggaaggcctacgtgtgggggaagctgtgcagggtgcagtatcgtagctggaatgaagggggaggaaaatgagggacatggaggagcagagacacccatggcagtgagcagtgggggctacagtgacctaaaagacctcaaggtccaggggcccccacttccttagtccaggaccagggagccctggaaacccttctatgcccagggagcctcagtgtcacatgagatggggtggctttaggagtaggggttcatagggatagaacatgggtctcaggccctgaaggacagaaaaccagtgtggacagaaactcctaggattctgtatccagaatcaggtatctaaagaggttatagattattcattccttcattcattccctccctccttcacgagaaagcttctgagtgtgtatgttacattgggcctgtgctgctgcagggtgccagtggggagagaaagctatgacctctcttttatcctcccatgggagtgacaccaacacattgggatacaagatttcaggtccagtgaggggcattaggatctgagggggaggactggatattccttgcactgactttgatcattgaggcaggcaatttagttctggagtaaaaacttatcagttgtccatttgctctcactcctctgaggtctagataagcatgaagaaaggatttgagccaatggatgactgtggggtccccaggacccccaaatccccacttctggtggaggagaggatggggctgtggctgcagccagacctctagtgactctgatctgccacttgtgtttgtgtgaccctggttcagtgactatgcctccctgtgtctcagttttctcccagtcagataagctaaatggcaaatggtctgtggcttgtcatgttgtctgtgaatgaagtttaaattattcacagtcacctgacctaatgcttggcacagaggacgtgttcacacaaacaatgtttattattatttgcctgcatgaaagagcatatctaggcctgatccatgatgaacaagatgctaccaggaacatcttctctcttctgtttctgcccctgaagacattgaattatctacggagtctcttaagtctcccagggcagttggctgatggcctaagaagcttgtccatctgtcctctgcactctgagtctcaggtgaaggactaggctctgtccatgcccagatgaggctctgggtgctgagccctggctgttaaacagctccaggaaccatggcccttgtacagctggtaaacctttgctcccagtcagccctgcccaggaggccacaacctaaccctggcacacattcccgagggtcacatgaagtcaggattctgggaccgggttctggggctgaggcttccagggttgaacttctctaagagaatccccgagggccccccaggccaggccctgacccagttctccaaggaatttctcagggtcatgtccatggggaaggcacggagtgcttggctgagactgttctccacctgctgtgtccctcccatcagactgtccttcctctgcagtgaatgtctgcagggtctggatttggggaaacaattttgatctgcagatgtttgtctcccctgtgtgtgtcctgcactaaatgctcaaaccctaaaatgggacataatgcagagggctacacaggcacagtccaggtctaacagtcctgtgtgtttgaagtagaactgacccccgacacccagaagtcatgaggaatcactcacggtgtacgctgatctgtgcagttactttttcagtcataagatctgcctttaaaatttgcacggtgtaggatcctgagtcattcagggcgatgttccagatctccaggcgtgctttggggtatactgtctcttggccactgtatgcaggccctgggatagttacttcattgtgtattacatatcttgcaattcagtcgtcggcatctattgtttcccctttgtaccagttgtggccaagtatatcctggggcagattgtagacaagtagaacaacctccttctcctctaccgcattagatggcagaacttcaactgtaacttgggcagtggtgggtgggttccagaaggtgaaaagtgaggctaggagagagagagagagcatcagtcaacattgggacctatgtattgggggggaaagatggggccctgtgtcctgagaaggtctcttcacccctcagcctttgagtatgtatgtgtgtgtgtgtcctactgagtcaaggttagcagcatgatccccattccttcaacatctctgaccttggcattttcctgtttggaatcctcttccccaggggtctgctcggccccctccccactgccctcaggtcctgctcacatcaggcatccttgggagactcttcccctgacacctcctctagagaccctgggtcttcccttgctgacctttccctgttctgtttactccacaactcctgtcaacacctgacctcacattctagatctctttgcatgtctgtcttccttcccatgaaagcatgagctctgtgagagcagggtcttgtgtgatcttggttgcacctcagttcctgggacaggctgcagactcctgtggatgagctcatgagcgttcccaaggtcttccatgtcctggaccaatttctgaggttggaggctgaggataatgtttcatgccctggttatgtttttatttgaagtgtcatctgatatagttattattatcatttttcaaaatttagtggccagtgatgattaaccaggaaaacagaatacttaagattttcctacctcttaccagttccagttttatatgattttcctgttgtgacccctgttcctctctggtgtcctctcccgtatccaggctccaacagaagccctcagtccccgctcagagctctgtcctccccaggagaccccagccagtcactctgcttcctccttgtgttcactcccagaaagttctctcttcacctgtgagcaggagcccctgtcaggggatgcgctgtgtgcagggaggggctgagaggggcctcatggcttgtgctgcctgtgtgttctcttctgtggaggtgagcctgggatccggaaactttctgagcatggttgtcagctgtgctgtgcttcctccttctgcgctgagcctcttcccagggcaggagcgcctctcaggctcatggttggggtctgtgcccaggacacctctctgtcccctcccctctcagtcctgcctccctgtctcttttctacctttctcttctgtctgtgtttcaggcccctgggaattgctgaggcctctgcctccttcagcagtgattctctcacccaacctctacacatgctatgtgcagacacacagacacacacacaaagagacacacagatacacatagtcacacagaaaccctgtagtttgggtgagcccagttctgggtcctcagcatccagccatgtttatggctccaggtcagcctgcacagttaccccttctgccctcttccatccccacctggctcttccgttcagagcaggaggcttggactgcaccagggccctgtcacagggatctaccctcactgtgctttgggtgagctgagtgctggctggtgagagggaccctttttctcattgtgtcaatattggctacagtttccaaggatggacattcaatgacccgggtgtcccagaagagactgtccttcctggaggtgtgcaggatgaatctctcatgccttctgggaagagaggcctctgctggttggtcagtgggggctgtggtcccaggaactggtctcagccactctcttgcaccctgggttctggttgctgagctggggctgaggcccattcatgttttctctgactatctttggtgtcccgtcatctgcccagctgactgtcctgtggtcactccaccttccccaaggctgatgcagcagggagtagggggctgcccagggacttcacaggacatggctctctgagacccaggacagagaacctgggacagagcaggggctcagagctgaagacattcaatctgacttactctgtggccaggatgggctcagccctccctgtgctgacattccctggggtctgtcctgagggttttgaccttgtcaaggccctcagtgtagaggaagaacaggcagtggcagcagaccccatgtgggggtcactgctcacacctgagagggcagatggggtggaattttgggatggattcatatttaaggaatgatccaacagtagacaattttgaaaatgtacagaaattcctatgctataagtttattctgcataaggtattttttcttaataagataattgacttttcattcatagatagctaatatggcctaaaatggtgagaacatcagagtggactgtttggtgtcttgtggtgtggtttcatgctttatttctcccaccccatatctacagaattctccatattccgttttgtaatgtaactcagtgggtgtcattctggtttgtggttacagaccattggaaaacccgtaccctctctgctgcgaggtacaggcagcaatgtggcatcagctctaaacatgctttctcccgtgacatcaaattgctgattaagtaaaagtcatttcaacagatactgaagatgtcagttgtacccctcacatactcacaattctttcaccaagagatgaaggattttactggtgagttgctttgagaggttagtgtagatctgattctgtcagggccacttttgccctctgagtgggcatttggcaaagtctggagaaattgttggttgacagaactgggggagggagtcctgtggcattgagtgggtagagttcccagagggtgctgaacaccctgctgctcacagagccccattagcatgaccacccctgtgtcaatgctgaggagtgcagaaccctgctgtgcccttctttagcttccctgggtcttccccagacctgatcctttcatctttctggactgctttcccatctcagctccctccttgcaccttagttccctccatctgaactcacacttagtccaaggccagccctgatctctcaactctcttggcccctttttgctccttagcaggagggaaccactagagggcaccctcaccattcctggagctcatgccctccctttcaattttgagacaaatatggctgcttttactgtcacaactccagccctccgcattctttagctttactcaggcagcagcacctggacaggcatcatggaccccagggaggactgtcactctggagattttggtggcatggactggagacctgaagccaccccaaggcccaagtcactggggagaggctgggtccaggtgagggagcttcacacttggtccagatgcccctgcctagtgtgggcactggggacatgtccatttgtctgtgtccctaaaggtcctgtcactcaggatctgtgcctgagggctttgacagagctgctgtggagctttccacatggggcctttcccagtggagcacgagtcctcccagggatttcaaggagggccgttgcctggaagaatcagaaggaatgtggcagccaccaggtgcaggctcctctcagggcctgaaaaaagggacctcttttcatcatttgccactcatgtctgcactgtctgcatcaggatggaatgatgtggaatttcatgcaaggtcattttgcttctgttctgctaataattttttttctagttaatcttttgaagtaaaggcaattgttgacttttgggtgttaaactcacctttcatttttggggaacaaactcaatgtggtaaatcctgacttttttggggtcatatttcatttgtggattttccctctctgttcccaagtagggcatgcagttttactttttcattgcatgatattcacctccctgtgtccatgtgttctcattgttcaactcccacttatgagtgagaacatgcggtgattcgttttctgttcctgtgttagtttgctgagaatgatggtttccagcttcatccatgtctcttcaaaggacatgaactcatctttttttatggatgcgtagtatttcatggtgtatatgtgccacattttctttatccagtctatcattgatgggcatttgggcatttgggttggtttcaagtctttgctattgagagtagtgcagcaataaacatatgtgtgcatgtgtctttatagtagaatgatttataatcctttgggtatatacccagtaatgggactgctgggtcaaatggtatttctggttctagatccttgaggaatcgccacaccatcttccacaatggttgagctaatttacactcccaccaacagtgtaaaagcattcctatttctccacatcctctccagcatctcttgtttcctgactttttaatgattaccattctaactggtgtgaaatggtatctcattgtggttttgatttacattcctttaatgaccagtgatgatgggatttttttcatatgtttgctggctgcataaatgtcttctttttagaagtgtctgttcgtatcctttgcccactttttgatggggttgtttgatttttttcttgtaatttgtttaagttctgtgtagattctggatattagccctttgtcagatggatagattgcaaaacttttctcctattctgtaggttgcctcttcactctgatgatagtttcttttgctgtgcagaagctctttagtttaattagatccaattggtcaattttggcttttgttgccattgcttttggtgatttagtcatgaagtctttgcccatgcctatgtcctgaatggtattgcctaggttttcttcttgggtttttacggttttaggtcttacgtttaagtctttaatccagcttgagttaatttttgtataagatgtaagggaggggtccagtttcagttttctgcatatggccagccagttttcccaataccatttattaaataggagctttcaaccctgccacagctgcgtttatacccattctttctcactgctaacgcagtttatttcttcttcttctattgctttgttgatgaattagtccagaagtttaaataaccttttgaatgctttgggtttttaaatttgtcttctagtttattattttctacctttaagtttcttacacttttattctacttgctttgtttttcactcacttcttatttggatgattaactcatttttaatcaatgttttcagtggaagcattttgggttgtgaattccctggggcatcactgtggctgcatcttacgacttttggtagatgtagctgttagtcaagtaccaggtacttaatatgttcatcactgtgtcttgattgacccgtgctttgaaaatccccagatgtctaatttttctaatttctaaaatttatgttatagcgattacatctagatcgaactgtatacaaaatatgtgcttgagtaaaaattattcaataatatctgctaatatatgagtaagcccagtcttcataaatgttccttgtggacttgaagagaacgtctatggtgcagggtatttggctgtagtgtgccatcgtcattgcctgttgattgtgtggttgaaatgtgtatcatttgtagagattaggcatgttccttgagtactgacaaagtctttaaagtgacttattgtggacaacatggacattcacagtgttaggtggataactagcaactgtcttgaacagaacaacatattcctggacatgttccaaatgaataaaacttaaatgtcaaatcaaagccaccaaagcacctcaaagtggggaaggactttgttattgtatagccaaggaagaaaagattgatacccatgaaaatttcgaaaagagtcttcacgtcaaaaaattctctttaaggaaaacaaatactatcttaaactatttgccattataataaacaggtaatgtgctattatataaaggatactcaaaattaacaagactaaagaatagcagaaggcaaatatatgaaaatcagttcacagaagaaatgttaatgctcactgttttcaagatcatgatgtttatttaacatattagagttcctagcctgaagcaataagaaatgaaagataaatcagtggtatgaggattaaaaaactagaaataaaaccatcattaatttcaaagaataacattgtttatatagaaagattcaaaatagtctaatggaaataattagaaataataagagagtttagggagctgagtagtataagaatagactaaaatatgttaatttaacaacaaacaactagatagtgtaattaaagagaacataatagtgccagagaatataaaatatttaggaatcaattcaaccaaaaccaaaatgcacacaatctcttcagacaaaattatagcaatcaagaaacactaaagcaggccttactaaatggagaactataccatatttatgcatcagaaaaataaattttctaaagatatcaattctgtttgaattgatgtattgattacatataaataggttcaccacattgattacaaatctctgaggccaaaaagttgtaaaactttccttttgtctcaacatttattttagattcagagggtgcatgtgcaggtttgttccctgggtatattgtgtgatgctgaggtttggggtacaaatggtgctctcatccaggtattgtgcatagcactgaacatttcgtttttcatttcttgcctgctttcttccctccccctttagtagttcctagcttctcctgttgccatttttaaaaaaaaattatttatttatttatttatttattgatcattcttgggtgtttctcgcagagggggatttggcagggccataggacaacagtggagggaaggtcagcagataaataagtgaacaaaggtctctggttttcttaggcagaggaccctgcggccttccgcagtgtttgtgtccctgggtacttgagattagggagtggtgatgactcttaaagagcatgctgacttcaagcatctgtttaacaaagcacatcttgcaccgcccttaatccattcaatcctgagtggacacagcacatgtttcagagagcacagggttgggggtaaggtcatagatcaacagcatcccaaggcagaagaacttttcttagtacagaataaaatgaagtctcccatgtctacttctttctacacagacacagcaacaacctgatttctctatcttttccccacctttcccccttttctactccacaaaaccgccatcgtcatcatggcctgttctcaatgagctgttgggtacacctcccagacggggtggtggccgggcagaggggctcctcacttcccagaaggggcggccaggcagaggcgccccccacctcccggacggggcggctggccgggcgggggctgaccccccacctccctcccggacggggcggctggccgggcaggggctgaccccccacctccctcccggatggggcggctggccgcgcggggggctgactcccccacctccctcccggacggggcagctggccgggcgggggctgaccccccacctcccttgcggacggggcggctggccgggcgggggctgccccccacctccctcccggacggggtggctgccgggcggagacgctcctcacttcccagacggggcggctgccgggtggaggggctcctcacttctcagacggggcggctgccaggcagagggtctcctcacttctcagatggggcggctgctgggcggaggggctcctcacttctcagacggggcggctgccaggcggaggggctccttacttctcagacggggcggctgccgggcggaggggctcctcacttctcagacagggtggccgggcagagacgctcctcacctcccagacggggtcgcagccgggcagaggcactcctcacatcccagatggggcggcggggcagaggcgctccccacatctcagacgatgggcggcagggcagagatgcttctcacttcctagatgggatggcggccaggaagaggcgctcctcacttcccagactgggcagccaggcagaggggctcctcacatcctagacgatgggcggccaggcagagacgctcctcacttcccagacggggtggcggccgggcagaggctgcaatctcggcactttgggaggccaaggcaggcggctgggaggtggaggttgtagcaagccgagatcaccattgagcactgagtgaacgagactccgtctgcaatcctggcacctcgggaggccgaggctggcggatcactcgcggctaggagctggagaccagcccggccaacacagagaaaccccgtctccaccaaaaaaatacgaaaaccagtcaggcgtggtggcgcgcgcctgcaatcgcaggcacttggcaggctgaggcaggagaatcaggcagggaggttgcagtgagccgagatggcagcagtacagtccagcttcggctgggcatcagagggagaccgtggaaagagagggagagggagaccgtggggaggtggagaggcagagggggtgttgccattttttatgtcattgaataccctatgtttagctccctcttatcaggttatggtttttagatttttcttccggtgttaatttgcttaggataatggtctccagctgtgaacatattgctgcaaaggaatgatttttttttcttttttaatgggtgcctagtattccatggtgtgtaggtagggattccttatctaatctactcttgatggacacctagattgatttaatgactcttagacatatgaacacaactcagcctcctatacacaggagaaatgaaatttgaggtccagggacagcaaatgttaaaatacaacctcagcctcaaatgtccccaaatacacatgtttgatcacataatgtgtgggagcaactgaggtgatagcaccatcccctacttttcttggaaacataaacattggtacacaccttgtggagtaaaatttctaaatgcatgtcaaaatttaaaatatatttctctttgcctcccaaacttcactgggaagaatttattacatttgcagtaatgaaaaatgacacctaatcatagttattcactgtagtgatggtttcacagcaaaatattgagaagaacctagattttacaccagtataatgctaattaaacaggttattttatatctacacaatggaatatgatacggctgtataaaaagtagaaaatcttttggctattcatatggaaacacctccatgttctgttctgattgtagcatataaacaacctaaaatgtgatgcattttttgaactagatcttatcttaaaatgttatctttatttattttttcagacagggtcttgctctcccacccaggctgaatttgcagtggtgtgattatagcttactgtggctttgatttcctaggctgaagtgatcctcccaactcccccttctgagtagctgggaccacagtatgtgctattatgcccatataattttgtgttttgtttgtttttgtagagatagggtttcaccatattgcccaggctcgtcttgaactcctgggctcaagtgatccaccagcgttggcctcccaaaatgctggaattacaagcttgagccactacatctggccctgcattcttttttttatgggacagcagtctactcactcattactttccctatcaggggaatttttttttttttttttttttttttttgttgagacggagttttgctctgtcgcccaggctggtgtgtagtggcgcaatctcggctcactgcaaactctgcctcccaggttcacaccattctcctgcctcagcctccccagcagctgggactacaggtgcacaccgccatgcccagctaattttttgtatttttagtagagacggggtttcacggcgttagccaggatggtctcgatctcctgacctcgtgatccgcctgtctcagcctcccaaagtgctgggattacaggtgtgagccactgtgcccagcctcatcaggggatttttaacctttccatttctctactgtgggtccatgccaatgtccagatgtatttatttgtctagaattggatgttcttgtaaaaagagcggtcgaaggaatggcctcctagctgatttccaggattctaatcttcatggtctaagctgtaggtttccaaacatggatactggttagagtcaccataaggcatctaaaacctacccatgcatgtgacttcccctaagaatgtctgatttgattggtgtgtggtatgtcctgggcactggtttttaaaaaatgcttccaagaaaaatggtaattttgcagtggagcaatcttagcccagtgctcaaaattaacatccccagtaatcagtgacatggacatcttagggcatcctaatatgatggatgaataacgcgcagcatcacctctgtggtattcttgcccaaagtgcataacctgagtttaattatgagaaaaaattagaaaagcctaaactgagggttattctacaaaataactcgccaatactcttcaaaaatgttaaggtcatgaactctaaagaaattttcggcactatcccagattaaaggagactgagaggacagaacaaagagatgcaatttgtgatcctaaattggatcatggtccagaaaaaggacatcagtgggaagatagggaagatttgaataaggtctatagattcattaattgtgcagtgtcagagatcatttattattttgatgattgggtagatatctataatgttaatatttggggaagttgaatgaaaagcatttgaggactctgactatttttgggatatttttgaaagtttgaatgtatttcaaaatagaaaaaggaaaaaaaggagaagaaatcttccagatattttcatcaagttgccagagtttaagaccatttcccaagttatcttgcctaattgtcagaataatcttcctgggaatgttgtttatcatatttgtgtccttttcaaagatttccagtgacttctcttatctacaggatgaagttcccattccttatcctgccattcaaagccctcatagaatggccccttgatcaatctacttctttgatctgcattgaaggaccacattttactttatcatgtctaaacattttccaattcttttccttgttaatatagcacccttgcctgtcttctcagtctcttgagttgttctttgtcccaaggcccacttcagactctgtctcttcattgaatcctgtatggtcatttctattagaagcagctaactttccacactttgaattctggtagatataatggtgtggagtgaaacgtgagttttattttattattattatattttagaaaaaaagccaatttagtatgcttattaaaagttttccttttttagggcaggcatgatggctcacgcctgtaatcccagcactttgggaggccgaggtgggtggatgacttgaggtcaggtgtttgagacaagcctagcccacatggtggtaccctgcctccacaaaaaagtataaaaattagctgggcatggtggtccacacctgtaatcctagctactctggaggctgaggtaggagaattgcttgaacccggaagacagaggttgtagggagccaagatcgtgccactacacttcagcctgggtgacacagtgggtgagactccatctcacaaaaaaaaaaaaaggaaaaaaggtttcctttgtaaaaaaaatttttaaattttaattggagaaggattagagattaaattgatgtttgaatttcatagggattaaaaaaatttttattttaggttcagggttacatgtgcaggtttgttatgtaggtaaacccatgtcacagggatttgatatacagattatttcatcactcaggtactaagcctagtaaccaatagtaatttttttctgctcctctccctcctttcaccctccaccctctggtagcctccagtgtctgttgtttccctttgtgttcatgtattctcatcatttagctcagacatataagtgagcatgtactattcggcttcttttcccacattagtttgctaaggttaatatcctgtagctctatccatgttcctgcaaaggacatgatcttattcttttttatggctgcatagtattccatggtgtatatgtaccacatataaaagtacagtctttcattgttgggcatttaggttgattccataccttttctattgtgaatagtgttgcagtgaacatttgtgtgcatgtgtctttatggtagaataatttatattcctctgggtatataccaagtaatgagattgctgggtcaaatggtagttctgtttttaactatttgaagaattgccacactgcttcccacagtggttgaactagttgaaattcccaccaacagtgtataaacgttcccttttctccacaaccttgacagcatgttatcttttgcattttttataatagacattctgactggtgtgagattgtatctcattgtggttttgatgtgcatttctctactgatcagtgatattgggctttttttcatatgctgttggccacatgtgtgtcttttttgagaagtgtctgttcatatcttttgtctactttctactggttgttttattctttttaatttgtgtaagttcctcatagctgatagatattagacctttatcagatgcagtttgcaaatagtttctcccattctgtacattgtttattctgttgatagtttcttttgctaaaagcagaagttttagattcagaaataagtgagtctgagttttgtttccaatttttatcaggtctgatataagggacaatttattgatgtctttggatagaaggataatagtgcctactgaaagggtcattgtgaacattggatgaggtgcaaacataaaggttcccagcacatagtagcttccttcctcatcatttttgtagcccagtggtccccaaatgtgttgtgggtgctgtgaagactcttatcaaattttttttgtagagcttttaaaaaatatttgtacctggccatcactaagatgaccttgaactgaactgagtgcttagggctttaaggagttcaattgagatttgtttttccaagaacacaacaaactaaataagtgatctatggacaggaatgtaacccaatggaggaaaaagggaaggtcaatgggattctaaatgagagatagctgtgatgctttctgcacccattcctttgctctcagtcagacagcgttaaggaagtacaacttttaaaattatgtaagagaagacaaaaatctcaggactttcaaactcattacaccaaagggatagttcagcctggagactgagtcatgcaatgctaccatctttttacccagtgaacaactgttaatttacaatcttgtgtgaaagcagtgttcaatagccagacccctacaagaagacctcaggcatctctggatgactgtcctcaaattgtcctttggtgaccttgaagcctttcaagatgtatatccatccataaaacaaagacacatcaattgtaactttaggtgtgcaatctaagtccagcttctaaaatgaaagcctgttagatttcacactgataatgcttatctttctaagtacagaagaaagacaagatgagaccaattattctttactatacttgtcccttcctacctgccttgccccctttaaggagatgtataaataccaggcctcctaaaaacctttttcagagagaacttaagacatggagggtttctatgatttgtgtttttccagggtgtgccctcaagctctggcttaagaaacctcaattgattcagacacttgcctcagtcactcattatggttaacattctggtgaccattaagggatactctgagtggagttttgctcccatgttttgtgttatcaaaaatgtggatatggggacatttgaggccacagaattttactttaacatttgctgtcccaggacatcaacttccgtttctcttctgtataggagggtgttttgttcacaagtctcagagctattaaatcaacccagctgtccatcaacagtggattagatgatgaaatccatacctatgctccatggaatactaggcagccataaaaaaagaaaaaaaatcatttccttcccagtactatgtttgcagctggaggccattatcctaagcaaataacaaaggaagagaaaaccataaaccataacctagtaagtgagaacaaatattggatattgagggacataaaaatggcaaaaagagaagctaggaactactagaggggagaagcaaggaagggagtaagaaatgaaaaactaagtgttgagtgctatgcgcaatatctgggtgagaggattattcatacccctaacctcagcattatgcagtatacccaggggataggtgtgcacatgtaacctctgaatctaaaataaaagttgaagaataaagagaaaagttttacaagtttacagtctcaagaactttgtaatcaatgctgtgaaactacttatatttattcaaaagatctacttggatggaattgatatctttagaatacttattttttcggatccatgagtatggtatatttctctatttaggccttctttaatgtctgttgattgttataattttgtctgaagagattgcagtgattttggtctttggttggattgagtcctaaatattttatattttctgacactattgtattccctttacactatctagctgcctgttttttctatacagaaattaatatattttagtctattcttatagtactcagctccctaaactctcttatttctacttttttattagtctttaggatttttctatataaacaatgctattctctgaaaataatgacagttttatttctacttttccgacctttgtacctcttatttgtcatttatttcttactgcttttgggtaggaactccaatacagtgttaaataaaagttatcactgaaaaaaatgagaatgaacatttttttctgtgaactattatatatttaccctcttttctgctacattttggttatattaattttatgtgttctttatatatgagcttattatctgtttattataattgcaagatattatttgcttttcttacagagaatttttccacatgaacactctttttgaaaggttcaggtatatcaatatttctttcttggctacacaatgagaaagtctttcttcaccttggggtggtttagtggctttgatttggcttcaatttttatccatttggaacatgtccagtaatatgttgtcctgttcaagatggttaccagttatccatctaacactgtgaatgtccatgttgttcacaataagtcacttaaaagactttgtcagtactctagcaaaaattcataatctctacaagaatatgcatttgaaccacacaatcaacaggcagcaagaatagcacactacgtccatatgccctgcaccatagatgttctcttcaagtccacatggaacatttatgaagactgaactaagtcatatattagcaaatattaatattaatataaatattaatagcattgaatcatttttacccaatcacctatttagtatactgtgcaatgtgggtactattctctaaaacatgaattttaaatattaggcatttggagattttaaaagcacatgtcaatcaagacacagtgatgaacattcaaatacttggtacttgactgacagttcatttgccaaaactcgtaagatgcagccacagtggagccccagggaattcatgacccaaaaggcttatactagaaaagattgattaaagatgagttaatcctcaccttaagaagggagagaaaaacaaagcaaggagaataaaacttataagaaacctaaaagtagaaaacaataagctagaagacaaattaaaaaaaaacaagaacatgaatagacccaaaaataatgttgttgaaaaagataagttatttaaacttctggactaattcattaacaaaacaataaagaaagaaaaaagaaacagatttagcagtgagagagagtggatgtaatctcatctgcggcagaagttgaaagtttcttttcaaaatttcacaacactaagttaattgataatttaaacaaaattgacaagttcctagaaaattaggtataataaaaagtagcacaggaataaatggaaattctgacctgtcctataactatgtttaaaaaaatttcttttgtgtgtgtgacagggcctcattcctgtttctccagttggagtgtagtggtgcaatcatggatcactgcaacctcaacctcccaggctcaagtgatcctaccacctcagcctcataaggagctgggaccacaggtgcatgccaccatggctggctatttttttctatttttagtagagacagggattcatcatactgcccaggcttgtctggacctcttaggctcaagttcttccttggcctttgaaagtcctgagattacaggtgtgagccaccatacccggccccaatcttgaaattttacttaatattttaaatattcacaaacatacacaaacacacatacatacatgtggatactcagaaaaagcagatgactttgggatgatgatgaatatttctacagtggaaaaaaataaatctacatctgtaattcacaccacatgctaatcttttttttttttgagatggagtcttgctctgtcacccagtctggagtgcagtggtgtgatctcggctcactgcaagctctgcctcccaggttcacaccattctcctgcctcagcctcctgagtagctgggactacaggtgcccgctaccatgcccagctactgttttttgtatttttagcagagacagggtttcactgtattagccaggatggtctcgatctcctgacctcgtgattcacccgcctcggcctcccaaagtgctgggattacaggcatgagccgccgtgcccagccgataatcttttcacaataaaattattgagaatattcttcaaaaggctcctaattttcttcgtttcttctacatacacaagacatacagagacagatctgtgtatctactatacaacaaagaagccatagccaaggtacatatgaaaatccaacagaaacagtaagaggaagattgataacacaatgtttttaaatggcggaaaactcttaagaggcaccagatggtagaacatgtgtaatggcctgtgagtacatgaaaagatgcatttgcactattgtttacttaggaaaagcatattaaaaccattttgaaatctcatcccaaccacagaagaaaggctaaaattcaatgggctgacaatcccaagagttggaacaactctacagagagatgttgctggtgggaatttagatgtgttcagctctctaacaagagaatctataatttgtagctatcttagaagatgtcccagcatatacaatggtctctacacccaaggaaataaatgagaccaccaaaatacatgtgtagatatgtccacattaacatgattcagaagacacaaatagtgttgcagtttgaatgtgtaacactacaggggataaaactgtggtgcattcaaactaacggatatttacaacatgaaaaataaatggattcctgctgcataaatcatggatgatctcacacaaagagttgcaagagaagagccagtgcagaggggaaaatgaagactgattccacctctataaagttcccaagaggcaaaacctatctgtagtgctagagatcagaatggaggtaacctggcacttggaatggctaggtttggggaggggaggtcatgaagcctgtcacctggacactctgtgtgagtacacgggcaacacccattacatctccacacacagctctggtcatcaggcatttttagggggactctagcaagggattaggaatcatgcatgagaatcatctacagagagaaacatagagttggaggagctggttgctaacgcagagcagggtccctgttgttcacaggtctagcctagtcttaagttcccagccccactcccactcctgccatgatccaggaacctctgaaaagcagctttttccaaggacctcctccttggtaacacatcaaggtttctcactgtcaagctgtccagaaagaaaagcaacttggatagtgcccataacatctgcgccctggggctcagggctcagcagaaatggcagagggcagtgagaggagacatggtgaatggggtagggacctagggacagctgcctggaacaggagcaggtggggccacaggagaaggtggcacaggaaggaatgggcaggagaggagaggagaggaggagacaggctctgtggggctatagcccagtgtgagcctttgtgaggctatctcagcagggaaggccaggtggtgtgaacaggaggagaagcaactcccacctcccctgctaggaactgaatgtgtacactcccaaattttgaaggtttcatttttaatgtgaaggtggtggaggtggtgccaggcatggtggctcacgcctgtaatcccagcactttgggaggtcgaggcaggcagatcacctgaggtcaggagttcaagaccagcctggccaacatggcaaaaccccatctctactaaaaatacaaaaattagctgagtgtggtggcgggtgcctgtaattccagctacttgggaggctgaggcaggagaaatgcttgaacctgggaggctgatgttgcagtgagccgagattacgctactacgctccagcctgggtgacacagtgagattccatctcaaaaaaaaaaaaaaaatttggaggtggggcctttgggagataattagaataagagtcagtcataaaggtaggagcttcatgatggaattaatgcccctataaaaagtggaagacacaggaaaatgatctctctctctccttttttctgtccctccaccccctcccaaccctccaccatgtgcagatacagcaagaaagcagcatctgcaagaaagccctcaccaggaccaaatcagctgacacctcaaccttggactacccagcttcccgaactgtgaggtatagatttttattgtttaagtcaccaaggctacggtgtttttaatagcagcccaagcccaggaatacatcatctgactcactattttgaatcaaactcttcagtttctccatcaacttagctggcagctcctgtccccagcagcatcagaggccccatgaaaagagctccagcaggggctcagcctgcatgggtcccatgcggcagcctcagtgtcagagcctggatggcaggtgaggctccagtgacacaaccacaatgtgaaagtgtaagagtttttaactacttatagatactggaaagcacagggcacacctggagaccacagacactggggtcagagagcccaggcagggaggagagaagggaactgtaggccaatggctttattgggtctagggtgttattgacaggtttccagaagggagctttaatgggtgtgtttaaagcaggcaaacactggggcaagaagatcacactgtgactgagaggtggtcactttaaattggagggcgaatgtcacaactgtttcagtttaaaggaagcagctggcgagaggggagcccagcacactatgcaagagagatgcctctaagattttatctgtggccaccgactggagccatttggaccgggtacagcagtggaaactctgtgatggtgacaaacatgggaatcactctgatgtgacgcagttaaatttacaccttaaaaaatggatgccaagacaacataaacaagacccagggacaccaacagggtatggtgctgtgccccagagtcagggtcctgggttcttacccagggaagtgagaaataaagataacttttccctgctccctctctcctcccctgacactgatcttcccaccctgtacctccctcttctgctcccaaacccccacccagtgctcagtcgcagacatcactgcctgcagggcatgcacagtgcagcccattgcacacaaactacaaactcacagaaggtgatgacaatttgtgtttgggacgtctgattgtgaaagagggaggacagcgtacttgcagccacagagactgaaactggaacgtgatggaacggggctggaacgtgatggagctctgacataacagacgtgtgactttgtgtgaaatgtgcagatccatgtggaataaaacacagcctagcctgtggctgctgccgtccacatttccctcatcttccaacagaagtcagcagggtccctcccagcctggaacctccctagagactgctgacctcccttggcagggcccacaggccagcagggtccgccctcaccagggtcacttggcccatgtcctccttgctcctccaagctccccacccaagtctgtcagcttttccctgcagcccagcggccacccacctgaggccactctctctgcaggcagctcctgcccccacaccccatttttcctggggcagtgctggtgcatgtgatgccacactgggcactttcccatcgtgacctccttccatcctcatcaactccttctgtgactgctccctaaatgcctgcccctgctccatctttcctgttctctggggcattccaggcttccagaacagcatctgcctgagtgcccacagtaccaatgggaatcaaccagacaccctgtaacctgccctctgcaccctaggaggctcagagcacatgtgacggtcacacacaggcaccatctgggatttgtccacctgtcccctgctgtccctcatgaagtcaggagggaggacagagctctccggtgtgtatggggtggggagtaagcatgagctccctgggttagaacacaacccaccttcacccgccctcttaggtgtgagcaccgtcctcccagatgggctatctgaccactacctgtgcttcctctacacaaaggggcttgaccaggtccaaatcctcaggacagaccccaggagatgtcaacatgaaaagggctgagcacatcctggcttcagagtaagtcgggactagtgtctccagctcagagcccctgctatgtcccaagctacctctcctaggtctcagagagctgtgtcctacagggtccctgggcagctccccactccttgctctgccagccatggggaaggtggggtgaccacaggacaatcagccatgcagaggacagaggacacccaagatggtcagggaggacatggaggagcctgaaccccagctcagccaccagactccagggagcaagagagtggctgagacttgtccctggtgaccacgaggttcacagcccccagtgaataaccagcacaggcctctcctcccaggagacataagagattaaccctgtacacctccaggaaggacagttccctctggaacactagggtcctgaaagtttatccttggaagctgcaggaagcttgacacaattagagaaagggagggtccttctcgctagccagcactcagctcacccaaagcacagtaggggtgtcctcgtgacagggtcctggtgcagcctgtcctcctgctctgaagggaagagacagatggggatgggagagggcagggggagtgactgtgcaccccaacttggagccatgaaaatggctgaatgctgagggtccagggctgggctcacccagcctacaaagtgtgtgtgactgtgagtgtctgtgtctctgtgtgtgtgtgtgtgtgtctttgtgtgtgtgtgtgtgtctgcacataatgtgtgtagaggttgggtgagagaatcactggtgaaagaggcagaggactcagcaattctgagaggcttgaaacacagacagaaggggaaggggagggaggaaaaagggggcaggactgagaggggaggggacagggaggtgtcctgggcacagaccccgcccatgagcctgagaaatgctcctgccctgggaagaggctcagtgcagaagaaggaaaacagcacagctgacagctgtgttcagaaagtttctggatcccatgctcatctccacaaaggaggacaagcaggcagcagagaccatggtgatttcctcagctcctccctgcagatggcatgtttcctggcagaggctcctgctcacaggtaggtgaaggaaggccttcctgggagaggacgggaggaggaagcacagtgactggctggggtctcctggaaggatggggctctgagaggggacagagggcttctgttggagtctgaataggtaagaagatacagaagagggacaggggtcaaaacaaaaaaaatcacattgatctggaataggtaagaagcaggaaaatctcaagtgttttattttcctggttaatcttcactggccactatattttgaaaaatgatattaataactatgtcagatgacacttcacataaaaacataaccagggcatgaaacattgtcctcagccaccaaccccagaaattggagcgtaaaccccgggatgtgtatagcactgggaacgctcatgaactcatccacaggagtctacagactgtcccaggcactgggatgcaaccaagatcacacaagcccctgtcctcacagagctcacactctcctggggaggaagacagacatacaaagagatctagaatgtgaggttaggtgttgacaagagctctggagggagcagagcagggaaaggtcagaaagggaagacccagggtctctagaagaggcttcagggaagaagtctcccaaggacatcctgatgtgagcaggacctgagggcagtggggagggagccatgcagactcctggggaagaggattccacacagggaaatgccaaggtcagaggtgttgaaaaaatcagggtcatgcttctgaccttgacccagtaggatacacacacactctaaggtggagggttgaagagaccttctcaacacccagggtcccatcttttgataccaatagataggtccccaaattgtctgatgctctctccccttcctagccttactttgaattttctgaaacctgcctaccactgcccatgtcactgttgaagccctgctgtctgatgctgcagaggggcaggaagttgttctacttgtttatcatctgccccaggattgtcttggctacaactggtacaaaggggaccaagtggctgccaaccaccaaattataggatatgtaatcgacacttaagtaactaccccagggcctgcatacagtgatcaggagacgataaacttctatgcatgcctgctgatccataacgtgacccaaaatgacacaggattctacacccttgaagttataaagctaaatcttatgaatgaagaaataaccatacaattcagcttacgccgtgagtgattccttatgtcctctgggtgttggggttcagttctacctcacacacacaggattgtcaggcctgagctgtgccttatttccctctgcattatgtctcattttagggtttggacattagtgcaggacacacagaggggagacagacttcagcagatcagaattcctttcctgcatccagatcctggagacattcactgtacagaaaggacagtctgatgtggggactcagccggagatcagtctcagccaagcacctcatgcctcccccatggacctgactctgagaaagaccctggagctgggccaaggcctggcctgagggacaccctgggattctcttagagaagctcagccctgaaggccccagctccagacttgtgtctcaggatcctgactccacgtgaccctggggagcctgtgccaggcctgggttgtagcttcctgggcaaggcttactggaagcaaatatttaccagctgtccacaggctgtggctcctagagctgcttaccagctatggtttagctccagagcctcatctgggcaaggacagagccttctccacctgagactcagagtacagaggacagagggacaagcttcttagtccatcagccagctgccctgggaagcttagtagactccatagaaagttcagtgtccccagggacagaaacagaagagagaagatgttcctagcatcccttgttcacagggatcaggcctatgggtagcctctcatggaggcaaataataacaaatgctgtttgtatgaacacttcttctgtgccaagcattaggtcagatgactgtgaatgatttaaagttcattcaccaacaacatagcaagccatacaccacttgccatttagcttatttgactgagagaaaactaagccacagggagacacagtcaccgaaccagagtcacacaaacatgaggggcagatcagagtcacatgaccctctcctccagcagaagtgggggcttattggtttccaggaacccccaccgtcatccattggctcacatcctttcttctttggcatccaaacctcagaggagtgagagtaaatggacaaccgattagtctgtactccagaactaaatcacctgcttcagctatcagagtcagtgcgaggaatgtccagacttcctcctcagatcctaatctcccttactgcacctgaaatcctgtgtttttcagagtgtcagtgtcactctcatgggaggctaaaggagaagactttgctttctctccccattcacaccctgtgccagcacaggcccaacgtgagacacacactctagttcttgtatgaaggatagagggattgaatgaagtatccataacctctttagagactggatcctggatgcagaatcctaatataatagaaattgctggccgtacccattccctgtttctcaggggctgagacccatgttccatccctctgaacccctgcccctaaagccatcccacctcctgtgactctggagttccttggccatgggagggttttcagggctccctggtcctggtctggagcactaggtgcacctggtccctggagtcactaaggtcattgtaacccccactgctcactgacatgggtgtttctggctctctctgctcctctgtgtctctcatcttctttctccttaattttagctgccatgccctgtcctgcacagcctcctctacccttgggactccccccgacattccctctaaaaaggctgattgttctgtttcccttcctgcttacaccgtggcctggctcagctcccaggaaataggaaaggcacataaattcagctggatctgcaggccctgctaggctccatcatgaaccagtgtccccaggtcaccaggagaatgagcttccattgagtccccatccagggctctttccgtttatgaggccaacatgtggaacaggccactagacagggatgaacagctcctctatcgactcttataatcacctgacaagttcttcttgcccgactgcacagacaaaaccaatttattgagatggtgatttgtagaaaaggaagattttaattactctgtttgccaagcaggaggacagaggttattatgactcaaatcagcctccccagttgctcagaggttatagtttttcaagcatagtttcagtggcagaggtctaaggaatgggtactgctgattgctcaggtatgaaatcatgaggatggggaaaatggcctgtattttctgaatccacctctgagtggaggccacatgactggttgagccattagtcatgggtctggatgaggtcagctggtttccaggatgcaaaagtctgagaaacatctcaaaagataaatctcagtttctacgatagtgatgttttctataggagcaattaggggagtcacaaatcttgtgacctctgtacacatgagtcctgagcagtaagggattgcagaaactgcctacagtttagcagaatttgggctgctcctgtaatcctaatctcatggtctttcattagttttagaaagccagtccctgagcaaggagggagttagttttagaaagggactattatcatccttgcttcaatgttaacctataaactaaattccttccagtgttagcctggcttatttccaggaatgagcaaacacatccagtcaggatagaggccagatggagtcagccatgctagcttgctcccactgtcctaatctttgcaaaggtgatttcactctctacattgactcagcaggggggtcagaggcaggggtacaggtctgcagtccccaaagcccacgggctcctttcatccatttcacttatgactccatcctcatcctgctagctgtgaggctcacatcctccagtcatttcctagagacttctggtttcctgtcaggcctatagcaagcttgaaatttgtcactcagttctaacaacaagtaaaaagctgaacaaactcaaaaatcaacaactcttttagatcccacagagaagtgaggtctcaatgctaactgacccatatattgaagagaccaacaggcaaagacagacaacacactttacctgagcagaaacccctggcacagaaacctcagtgggaaccagtactggggtcagaaaaacctgaactgtcactaatgaattgctggagggtcagtgtgaacaagatccagagttaaacactcaggggaatggattacttctgggggtagggggacatgtttgtgactcttagcttctggagcactaccaggttcctatagtaatacccagtaaaaatcagctcatccttcctgcaggggaaggggaaaagaaaccactttgaaagatgccagtgaattctattctgggcaagacctgcctttaagagaaactattttaccagagtctaatcagctggggtttgataggagccttaaatgccctggggaaggggaaatagccaactctagccccctgtagccatcatgtcccacctaagggaaagaaaaaactgagaggcacttacagcattcacagcccaggacacagctctaatgcaataccacagaacccttccctccatggcatcactgaatgcctcactcaccacagcatcactgaatgcctgctcacccaagtttcttttacccagtacatcatgtctgatttgcaaaaaaaccatacaaggcagactaagaggcaacattagacactatgcagaaacagatgggtgacataagtagagagatggatattctaagaaagaaccaagagaagtgctagagataaaaaacactgtaagagaaatgaaaaatgcccttgataagcttttgaaagtgtgtatactggtaggcttaacacagctgaggaaaagatctttagctttatggtgtgttaatagaaacttcaaaaactgaaacagtaaagtttaaaaagagtgacaaaaaagtggaagaacatattcaagttcatactgaatattttgtattgacaatagcatattttatgttttgtagttgtgggacaactacaaaggctgtaacatacacataatgggaatactgggaccaggcagaggtggccaggtgggtgctatctgatgggcttactgcctgtttcacacacatctgtgtcctcatcgtgatgccattgccataaggtggggtctttcaggtggggagatgcacaagccactggcatcttacttagactctgcccagtttaaacgaacttaaactctagttgtgtttcctgaggtctagggaaaatgaggaaagcatttcacatgcctgtttcaggctcttccccatttttcctaagtctgcacaggaattagggatagggaggtctttctaaatttgctaatataacacacattgcttctcctaattcggcatctttcctccctttatgtattgtaattgacacacataagacttcttctttgactggtactgtcctcctaacaggaaccatgagcctctctctattcagggagttgctaatttcaaaccaccttcagcatcttcctttgagcataatgccatcctgctggaattcacagcacaccttaaccttattttggtatctagagaaatactacttccatcaatcgaacttagatatttgcactattaataacaatttctacttatggaaaaaatttaatgtttcctccaatttttttttgttactatagtcagaacataacatgagttctaaactccggacaaaattttaagggcagattacagtattacacatggagctccccaaattcaaaaatccaaaatctgcaatactccaaaattcaacatttatcagctgctgatgtaatgctccaaagaaattctcactggaacactttgaattttaaaatgttcagattcaggatgctaaaccagtaagcatactacaaatattcacaaatctaaaaaagttagaaacccgaaacacatttggtcttaagccttatgcataagaactactcagtcttaatgaactgtaggaaccaagctgtacagcagatctctagaacctcctcatcttgcataactaaaactgcatatccattgaaaaactccctattcacttcagtcccagctcctggcacccaccattctactctctgattcactctggaatccacttatatgaggtccctagagtagtcaaactcatgaaatctgagtgtagaatgtccaacaggagaaaatatttgcaaaacttcctcccaaatttctgtctcatattccatcaaacacacatggtccatgaggaccagatttccaacagttcatgttccctgtctccaccagtcagttctgcatttgcaaacatccacatgtatttctagaaagatccacatggtcctcacctgccctctgcaaagggagagggaacatcaaaaacccaggagggggaatatgtttctgctccaaagccaccagcttttgcttgtcctcttcactctttctagatcattctttagactctgctctatcttcagaggtcactggttcaagtcattcaccatgaaatatttggtgaaaattgttccacctagtggctccactgcctgatgactgaattggcctccaggcttgcccctggtctcttctgtgttaattctactaaaacatccagtcccaggctaaggacagtgaaaagtcccattgtcacccatctctaagatgctcttggaaagggaagccacagagaaaacaactgggtggtggtgggtgggggtggggggcaaagtaggactgtgaagctggaaggagcacagcacctgcacattccaggtgtggataccaaggtgggccaggcaggcagcaagtcagggagggaccaggagaggcaccaggagcggtgacttctgcttttgtgtttatccatgacccagtgctgctgctcaatttatacttgagaaagcctgtgcttctctaagacagagcaggcagactcatggtctctgagccctcagatcatcatgcatctgtcttgtgacacacacacctgccatgggtttttaaagagttgggtgggctgagaggtgggagatgccaactctgattgaaagatgcccatgggggaatcaaaggtgccacgcagggcaatcttctgttatctgcacagcagagctgtccaagccctccgtcaccagcaacaactccaaccccatggaggacaaggatgctgtggccttaacttgtgaacctgagacccagggcacaacctacctgtggtgggtaaatggtcagagcctcccggccagttccaggctgcagctgtccaataacaacaggaccctcactgtactcaatgtcacaaggaattacacaggaccctataagtgtgaaatctggaatcgagtgagtgtcagtcacagttaccctgtcaccctggatgtcctctgtagcccaggctgccaacccaaattgacatggccagaatccaggcctctcagtccttctcaggtccaagaacagagactctcagccctggatatcaaagctgtccatgactgcctgccccaggcaaattttggtaggcccagccttaaccaagaataagagaggaatgggatgctcctgtcacaggagacttgaggtccccagtttgtgatggggaaacaggtggatgtctcagactccagctcagtggacacagcaggagtttggttgggacttaaggattcttcttctttggctcagagggacactgtggcctttctacagaccaggagtattcttggcttatcaatgaaaagctccagcaatacacacaagagctctttatccccaaaatcactgcaaagaatagcggggtctatgcttgttttgtccgtaactcagccactgacctcagtaagttcacagtcaagaggatcacagtctctgataagtggatctctgcatcattggcaatatgtttttgggtggagtctatctggcttttagagatcagtgaggaaaaatattttattctcagtcaatgtccaatggacaaaaggaaatcccaaatttttctcttggaccctcccgatgcatctatatgactccctgccccttgtttttctttctcatggctgcccttgggtccagcctgagaaatatgtcgagggggctttgtcagccccagagcacttcactgagggggaaggaggaggattctcaaggccacgttgcttctctctattaccaacacatttttttttctgttacctctttgttttcttttacctactccttgagctacaaggaacatctgaagctttgaaacaagctcacactttttcccaaatgagaggaggacgccccttggatgaggaagaagcagctcagactctgctctctgctctgcttcaggctcacttggtgactggccctgccctgactccacctggtgtgagaacagggtggtggaaaaggtgcctgggtggcctgtcccgaatctggctaaatctagctgccagcagaagcaaagcctcccccaggttaggctgcagggaaatgggaagagagggagcctcagggcagactcctgagctgtgtcctggctctgaagtcactggctgtatgaggctgtgggcacagcacatgggacacagcacagaggacagtgagtgatatgcaatggaaacatttggagattaacccttgggggcagggaaggggcagtgtcaaaaagtgtgtatttgtagagagggtaaggctaccaggcaccatatatatatatatatatatatatatatatatatatatatatatatatatatatatatatatatatatatatatatatatatatatatatatatatatatatatatatatatatatatatatatatatatatatatatatatatatatatatatatatatatatatatatatatatatatatatatatatatatatatatatatatatatatatatatatatatatatatatatatatatatatatatatatatatatatatatatatatatatatatatatatatatatatatatatatatatatatatatatatatatatatatatatatatatatatatatatatatatatatatatatatatatatatatatatatatatatatatatatatatatatatatatatatatatatatatatatatatatatatatatatatatatatatatatatatatatatatatatatatatatatatatatatatatataaaataagtcttaccgttaactatttctaagcgtgcaatttagtgttgtgtaaccgttatcactatccatttccagaactttttcatcttaccatactaaacctctgtactcaatacatgataactctcactccttcccccacaacccttactactcaccattctactttctgtgtctgagtgattgactattctaactatcttacataaatgggattatataatagttgtcctttggtgtctggcttttttcacttagcatcatgtcttcaaggttcattcattttgcaccttgtattggaattttattccttgttaagattgaataacattgcaatgtgtggatacacctcatttttctatccacttatctttcaataaacttttcagttgtttccaccattttggctattgtgagtaatgctgttgtgaatggcagtgcataaatatctaatcagatttctttccattgttttgggtgtatgtccagaagtgggattgctggatcaaatggtaattctttgtttaattttttgggaaatagccataccattttccacagcagctatagcatttcccatttccatcagcaatgcactacagctccaatttttccacttacttgaagatactttttgctttgtgctgttgttgtttttatcaaagctatcctaaagtgtgtgaggtggagtatacttgtggttttgatttgcatatctctaagtattagtgatgtcgagcatctctacatgtgcttattggttatttgtatatcttccttggagaaatctctattttagtcctttattcattttttaattttttttttggatttgtgctgttgttgatttgtaatagttcttcatatattctggaaattaatcccttatcagatatataatttgcaaatatttttcccatttcataggttgccttttcacttttctcaataatgttttttgaaattcgaaagttttggccgggtgcggtggctcacgcctgtaatcccagcactttgggaggccgaggtgggtggatcacgaggtcaggagatcaagaccatcctggctaacacggtgaaaccccgtctctactaaaaatacaaaaaaaattagccgggctttggtggagggcgcctgtagtcccagctacttgggaggctgaggcaggagaatggcatgaacccaggaggcggagcttgcagtgagcggagatcgcaccattgcactccaacctggcgacagagcgagactctgtctcggaaaaaaaaaaaagaaatttgaaagattttagcttttatgaagtacaatttatgcattttcttttgttgcctatgtttctgttgttataaccaatatatcattgtgaaatccaatgtcatgaagcttcttttctttgttttcttctaagagtttggtagttttcagtcttccatttaggtccttgatccattgtggattaatttttgtatacagtgttaggtaaaggttcaattcatttttgtccatggatatccagctttcccaatattattttttgaaaagactgtcctttccccattgaatggtcctggcacacttgttgataatcatttggctatatatgcaagcatttctttctgagctctctattctatgccattggtttctatgtcctcctttatgccagtagcacactgtattgattactgtggctttgctgaaataaggaagtgtgagacttccagctttgttctttctttttaaggttgcttggttatttagggtcctgagattccatataaattttaggatagatttttctatttctgccaaaaatgtcactaaaattctggtggaaattgcattgaatctgcagctcactttgcatattgtcctcctaacaatattgagtcttccaatccatataaaatgaagtgtttttccatttattggtgttgtctttaatttctttcagcaatgttttgtagtttacggcatacaattctgttacctccttggttaaacttattcctaaatattttattccttttgaggttaatttgaaatgaaaattttttcttaatttcctttcagagtgttcattattagtttatagaaatacaactgatgttgcatgttaatttagtatccggcaacattactgaatttatttattaattcttacaggtttttttcatctttaggtttttctacatacaaggtaaagttacctgtgaacagatagataatataactactttttccaatttgaatcttttttttcttgcctaatttctttggctaggacatctaataccatgttgaatagaagtggtgaaagcaggcatccttgtcttgttcctgatcatagagaaaaagctttcagtttttctcctttgaatatgatgtttgccttgggcttttcacatattacctttattatgttgaggtgtttttttttcattcatatggagaatgttattatgaaaaattattaaattttgtcaaatgcttttagttgttcaatcttcttactaattataggtctattcagatattttgtatgtctccaggaatttgtccatttcatctagtttatccagtttattggtatacaattattcctagtatttttctaatcattatttatgtataattgatagtaatatctaaattttcctttcttttctttttgcatagagagagagacaggcttgtactctatagtttcacaccatgctggagtgcagtggcatgatcagggctcactgcagactcaacctcctgagctcaagtgatgctctcacctcagcctcccaagtagcttggactacaggtgcatgttaccatgctccgctaatttaaaaacttttttttgtagagacaccgtctccctttgttgcccagactggtctcaaactccttacctcaagtgatcctcccactatggcctcccaaagtgataggattaaaacatgagccatgccaagactttattttcatttctgattttaaataatttcaatattctctctcttctcttagtcaatctagttaatggttgtcaattttgttgatcttattctgaagagccaacttttggtttcattgatttcctctattgtttttctattgtccattttatttatatcgactctaaaccttattatttccttcattcactgtgtttgggtttagtttgttcttctcctatatcctgaagttgtaaagtagattgttgacttgagatccttcttcttttttaatatgagagttaacagttataaatttcttgcacaaaattcttaagttatctgagcttctgactcctcaattgaaaattgcagtaacagcgctttctttatactattgttttaaaggtttaatgtaatcatcaatttaaccttcagaaaaatgccatgcacgcagcaaatggttaatgttagctgctatattactactattatcattagctttgaagtcaggtaatcctagaatcaaatcttagattcacttctcactagccatatgacatctgaaaagttttttcactactccaagcctctgtcttttcatctgtaaaatggaagtaatgtctaccaggcaggtttattgtatgaatcaagtaagatacaggcaaagtacttagcacagaatccggcacataggaattgcccctcagtcatagctaacatagcattattcatcagcctgagttgactggtaagggctaaaagtaaatggttgcaacaaaaataaagaaacatacgccaaaaatgtgtgtgtgtgtgtgtgtgtgtgtgtgtgtgtgtgtaaaaggtattttatgtaaatacaaacacactgttggagaccagcctcaacaccacccgtagggtacctgaagtctggtggcgacaaaggaatgagcagagacaggttaagagttcataaaggtgggagccagggggccagttgcaaaatggaggctgcaaaaggtgccaagctctggtctccatactatttattgagtacaattacttagatctaagaagcagatgttcagggcaaaacagtgaaagggaggcagtatgtcataggtgtaatctatagcaatagcagtttaaatgaatctcctttgcgctcaaacagcatatctttaacttatcggagagtagctagtgggagtgggcttaactgggaacctgcatgtctgtccacattccagtgtttcaaaggagtgtctttctccttgaacacagtgtttatagataagaaagcaggtctcactctgaacatgggaatatgatggcaattaggaggctttcctcctcagaggcctcttgtggctttccacagcttattgtcccatatttttgtggccagtttatacaggcaccccacaatcccttttcccaacacacacacacatatggaaatatggaaaaagaggtaacacagaaaatactaggacactgttactgactacatgtgggagagagagaaaaaactaagtgcaaagaatcaagcctggaatgttagtttttaacccattcagatgcagccaatagtggattagacatggaagagaatttattagggtaaatgcctgtgagggaaaggaaggcaagtgtgagagaagcctgagagagctctcagaccacaacgcagatctgatttctgtgaaagataaagagaaagaaattttggatagcaatgcagttcaaaaagagtttctgcagggctgaaggggagtgccttcaccagtcacccattagagttacacagagtctcacagaactgggcttgctttcatacccctgctgggaggccctgggaagtgaggtctctgcaagggaggtagtgaatttgaaacgcactgacctggcccttctgtcaagcacctccctgccatagagactgacagggtctaattcatggctgccaaaactgagacactgagaaaaagatgcaaccatgaaaaggtggaaggttctaatgacatagcaaatagccatcagcctttctcacatcccaaagccttcaaaaatatctgagtgcagaaagaccaggaaggaatgacagaagactatcaccaacctagaaacatggtgagagaaggaaaaaatggcaaaaatgtggttggctaatcatctctcatcagccttcttatacaaataatttattccttgaaggaacaagtacagtactccatgccgagagctggttcttggggcaccccagtgtaaaacaacatcacttttattccttcttttattttccttccattacagatgtttcagcacagggaagttctcctgtcctcccaactaaggccactgtcagcatcatgattggagtactggccagggtggctctgatatagcagctttggtgtagtttctgcatttcaggaagactggcgggtatgatggcctttcctcttgtcctgtttcctgcagggctgactgccatgcttgggagagggacctatatcccaggactggatctcctcctcctcccaataaactcctgcttctcagcactaattcctgcaggtctcttcttccctggtctgcatgctgcctgtaccccactgtctcttagatgtgattatccccagcctctgctcatttgtttcccagattcaatacactatgaaagtcttttgatcctttcttaacatctctcacttgtgtcattctctccattcccatagacctcaacaactgcttgaattcctgcttgactccttgtctccagtatttgaaatcttccttgcatatgacttcctcattaccttcctaaaatctagttcactcacctactcaagaatctacaggggccgactctggcctattagataagtttacatttcttctctttactaatccttcttacttcctttaccaccactcccttatataattcctctatcctaattacatctgtctccctacatatgcctgcccacccatgccatatacacaagggattattagttcaaattgtatgcctaaaacagggtgaccgccctccatcatctgcactgcaaagttacccacagccttcatcacaagcaacctctgacctcatggagaacaatgactctagcattaatgtgtgaatctaagacttaggacacaatatacatgtggttgggaagctttccctgataaccaatttatgtgttcatgaaaaatacagaaatgaagaaggcaaggtccctaccccagggatcataaagcctaagacacaagataggaccttaaaagtaattataaactccggccctggaccctacagccaccaagatgttaatgcctaagaagagtcggattgccatttatgaactttttttttttttttttttttttgagacagagtctgactctgtcgcccaggctggagtgcagtggagtgatctgggctcacggcaagctccgcctcccaggttcacgccattctccctcctcagcctcccgagtagctgggactacaggcgcccgccaccacgctcggctaattttgtttttgtatttttagtagagacggggtttcactgtgttagccaggatgatctcgatctcctgacctcgagatccacctgccttggcctcccaaagtactgggattacaggtgtgagccacggcgcccagccatgaactcctttttaaggaaggagtcacggtggctaagaaggatgtccacatgcctaagcacccggagctggcagacaagaatgtgcccaaccttcatgtcatgaaggccatgcagtctctcaagtcctgagactacgtgaaggaacagtttgcctggagacatttctactggtaccttaccaatgaaggcatccagtatctccgtgattatcttcatctgcccctggagattgtgcctgccaccctacgccacaaccgtccagagactggcaggcctccgcctaaaggtctggagggtgagccacctgcaagactcaaaagagaggaaaccgacagagatacctacagacggagtgctgtgccccctggtgccgacaagaaaaccgaggctggggccgggtcagcaaccaaattccagtttagaggcggatttggatgtggacgtggtcaaccacctcagaaaaattggagaggattattttgcattgaataaacctacagccaaaaagaaaaaaaaagtaattataataccaaaatagaacaaaatgaatgccacaagaattcagataaatctgatgggaaatacagccacacattggaatcacagggaaacattttttaaaaatggatgctgaagccctcactccccataccttctgatttagtggtctggcgtgggacccaggcattgataatttttaagcttccccagatgctactaatgtgtaaccaggatggtgaactctcctgtttaaataggtaggacgtagggctaaattaatggtttttagctagatgacctagggaggtttttcaacatacataagcctatactttgttggccatatttgttaatgggctacaccgagaactcagtaatccagttaagaaacacaagctaaatggaaaagccactttatttgatatgttaaattatatgggaagcattgtcaaatgataagtttgtgaggtcatcaacttcttgtcctggtttgcagttaagtgcctctagttatggtgtcaaatattttggtgagctctgagtggcccatacctcagacatgaaggttttcccatgaaatttacattgagttgtccccctccagcttatagggcttcaggaacacagcagatcttgttcttactgattccataggagaaattgggttggagaaactagaagaattcagggtccagtccagtctacaggtggattataaaaactcaaaaacaatgaacagagctgaaatctcataaaagttgtgctacagtttttcttctcaacataatttttctctctatgggcatctctatttctaccaaagataataccactaaggcaaatttgtttgcaaaatagattgagtctcatcaaacttggcgtgtattctcaatgttaatttatgggtatgttactgatatgagtcttccaaaaattatatgagattcatagaaatctaatatcagtcataatgtcatatgccacagaagcaactagatttctatatgagccatgtctttatcttaatgaacgctcatcagatttttaaccatagttattttaaatctgtcattcatagacagttgttttgattcttcctcaaagtatttccaatcagctacagtccaaaattgcttcttgcttcaaggagatttacagaaaaggctctgacaaggattctttaatacaagtttttgatgaatttaagataccactggactgtctaagaacttccaagttcttctgataccttcatgaaattgccagccaagaccaagcaggaaaaaactcaatttcattggactaaataataataatgatgagaatgtttttatgattttttgtttggagttttgctgattctttaagtggtttgttttccagatttatggaattttttcttttaaccaatctatagcacacagtaatttgacaaagtatacttttgtgaacaaaaattgaagcatttacttttgctccctacctgactgccttagaattgggcaactattcatgagtattcatatgtttatggtaatacagatatttgcttaagttcaataaatatctgctctctttataacaggatacatttgaaaacattggttatattaccaaggctttgactgggatattacatttgaaaatataaatagaatgaaaccacagatactgcaggcaagtgtaaagtaagccttggtttggcttcctggtctcaagaggtttttgaaagtttaatctgagattccttataaaaaatatccagcaaagcaaagtttaagaagagcctatgtgatccattacaactctttctgcacttaatgtaaaggccaagtttgatgagactcaatctattttgcaaacaaatttgccttagtggtattatctttggtagaaatagagatgcccatagagagaaaaattatgttgagaagaaaaactgtagcacaacttttatgagatttcagctctgttcattgtttttgagtttttataatccacctgtagactggactggaccctgaattcttctagtttctccaacccaatttctcctatggaatcagtaagaacaagatctgctgtgttcctgaagccctataagctggagggggacaactcaatgtaaatttcatgggaaaaccttcatgtctgaggtatgggccactcagagctcaccaaaatatttgacaccataactagaggcacttaactgcaaaccaggacaagaagttgatgacctcacactgtggacagcttttcccaagatgtcaaaacaagactccccttcctgatgaggctcttgcccctcttaatttgtccttgctcatgtctgcctctttttcttggtgagataatgctgtcattagaatttcacaagaagtatcttctgagggtagcttaacagagtgttgaatctgggatgaattcattcccttatttccacataacataagagatcctttagtctacccaatggctgacattagcagcatcttttttttccttcagcaataaccacttttaatgatttagtgtatatttttataatcataaattttacttgtttgaacaggtaatgcattaacagtacaaatttcaacaggtagaaaagcgtatactgaaagtgtccctcataacacctatccctcctccatcctatcacctggtttccctctgcagaggcaaccaggaatatctgtttcttatgtcttatccagacatattctatgtgttaggttggtgcaaaagcaattgcggttttgcccgtacttttaatggcaaaaaccacaattacttttgcaccaacctaatatttacaagcacattggaaggcagctatgctccccactataccaccaacacatcttataagcacattggtctagtctttcttctttttttcaaaagtaaatggtaaacatttgaggcacactgtttgcatctggcttcttcatttaacaatacatcttgcaggtcattccacatcaggatataaaaaatctcttagtcttttaacagctgtatacttgtcttagtccattttatgttgctatagcaaaatacctgagactgggtagcttataaagaaaacaggtttatatggcttatgattctggtggctgtaaagttcaaaattgggcatctgcctctggtgagagcctcaggctcattagcagcatctttaacacagctgttttttcagatgtacagtggtcccttttagactttagaccttcagactcacctgttctcactccctgtttaatttaacccagccatgggatgctagttaataaattggccactactagctgaacaggaaggagtctgtgcagtttctgacacttcttgttgcacatggataaatacgtcggatattatagagacttagttgcaaaaattaacaaatgtgctgcttggttaaaatggctaggctcttctggctcactctttgatgtgttctattttagttggtttgcatcttgcctaaggtgcatattccaaactcttggtattatcttcctgatagtcatattagtagtctcctggtgtgttgtattctgttgtattctccaaaagtttttaaatgtttgcatgcagccatccattgaatatcaaatagtgtctctttggctggagttacaaaaactcaaagaaatgtgtgatcaggaggacattataacctatgaatgatggaagcccaaaatgatggtgatagaaaggattgctaatgtcttaagttctggtcccttagtgaggtcctagagactccaaaacagagccactcatgctaaatgctacatactccgactgaaattttaaggaagcagacagattccaaaacagaccatttttttttctgagaacaggagattccagtctacctgagtcagcataataaggaagtcacctctgctttaacttttacaaaaaaagtgacctgaagtacattgatgttaaccaatccatttctttttttttttaacttcttaaatgcacaaatttattttttctcaacaaacacacatcttaatgcctttacaacttttatctccccaaatatatcttgcttttctttatacatgctgtatacagagttgttttccttatatttagtagttattgcttttttgtgcccttttgggtcctgaatttacacatcaggcatagagcttgggacaggaaagagctgtgaagcaaattcctggaagatcaaaccccttccagcatggccaggtagcacagctgagccagggatgatggggccatattgggtttggctctgccttgcagctggcagtccaaacactgaggacatgcatatttctgcgggcctcactatggtcatctgtccaaaccccagaatccagagactcaaaacgaaatacagtcatacagtaagatatgtgcaaggtttcagggagcccagcagccagaccttacagctttagctcaatttagacaaatcaagcaagtttaagaaatattccagaagtagcagttttatgatcttaaaacatgtaataggctgggcacggtggcccacgcctgtaatcccagcactttgggaggccaaggtgggcagatcacttgaggtcaggagttcgagaccagcctggccaacatggtgaaatcctgtttctactacaaatacaaaaattagccaagtatggtggcatacacctgtagtttagctattcggaaggctgaggcaggagaatcacttgaacctgggagacagaagttgtggtgagctgagatctcaccactgcactccagcctgggcaatgagagcaaaactccagctcaaaaacaaaaaacaaattaaaaaaaaaaaaaaaaagtaatggagacaatgtaaacctgtgtgtcagtagacccaggaaaaaacaattatatttaactgacaatcctgaagcctttccaattttcttttttcttttttttttttttattgatcattcttgggtgtttctcgcagagggggatttggcagggtcataggacaatagtgaagggaaggtcagcagataaacaagtgaacaaaggtctctggctttcctaggcagaggaccctgcggccttccacagtgtttgtgtccctgggtacttgagattagggagtggtgatgactcttaacgagcatgctgccttcaagcatctgtttaacaaagcacatcttgcaccgcccttaatccattcaaccctgagtggacacagcacatgtttcagagagcacagggttgggggtaaggtcacagatcaagaggatcccaaggcagaagaatttttcttagtacagaacaaaatgaaaagtctcccatgtctacctctttctacacagacacagcaaccatccgatttctcaatcttctccccacctttcccccctttctattccacaaaaccaccattgtcatcatggcccgttctcaatgagctgttgagtacacctcccagacggggtggtggccgggcagaggggctcctcacttcccagtaggggcggccgggcagaggcgcccctcacctcccggacagggcggctggccgggcggggggctcacccccccgcctccctcccggatggggcggctggcagggttgggggctgacctccccgcctccctcccggatagggtggctggccgggcgggggcctgacccccccacctccctcccggacggggcggctggccaggcagaggggctcctctcttcccagtaggggcggctgggcagaggcgcccctcacctcccggacggggcggctggccaggcagggggctgaccccccgcctccctcccggacggggcggctaaccaatccatttctatggctctgtttactggttctcatttgacaaaatccactgttctgttattgtattgcccagggggagctatcactgtatttatagaatgagttctgccccaaatcatgaatcacaattaaaagccaatttgatctggccgggtgcggtggctcacgcctgtaaacccagcactttgggaggctgaggcaggtggaccacaaggtcaggagatcgagaccatcctggctaacatggtgaaaccctgtctctactaaaaatacaaaaaaaaaaaaaaaaaaaaattagccgggcatggtggtaggtgcctcccagctactcaggaggctgaggcaggagaatggtgtgaacctgggaggcggagcttgcagtgagctgagatcgtgccactgcactccagcctgggcgacaaagcgagactctgtctcaggaaaaaaaaagcgccaattagatttgtaactaaattaattatagatctatagtaattttgtctttcgatgcacgttcacagccagcgatggccaatggtgtctctcacgctgcatcattctcaccctgaccctcctgcctccctctttcacttacaagtacccttatgatacactgggcccactgagataatccagaataaccttcccatctcaagattcttaacctcatcacatcttcaaagtctttttgccaaatatagtaacatgcactggttccaggggtcaggatgtggacatttttaggaggccatgattctgtgtaacacacgtacccttcatgaacatcaactacaacaaaaattagctttaccttccttctgtgtctcacttttctgactgtgcataaactttaagatgaaacacagtagttctgctatgaactggctggatgaccatggaccactgacttaaattccctcagcttcttctcctctgcggtagaatgtgactctttttttttttttttttactttttttattttcttttttttattattatactttaagttctgggatacatgtgcagaacgtgcaggtttgctacttaaattccctcagcttcttctcatctgcagtagaaggtgactcttttttttttttttttactttttcttttctttttttaaaattatactttaagttctgggatacatgtgcagaacatgcaggtttgttacgtaggtatacatgtgccatggtggtttgctgcacccatcaatcgatcacctacattaggtatttctcttaatgctatccctctcttagtccgccatcccccaacaggccccggtgtgtgatgttcccctccctgtgtccatgtgttctcattgttcaacccccacttacgagttagaacatgtggtgtttggttttctgttcctgtgttagtttgccaagaataatggcttcaagcttcatccatgtcccttcaaagacatgaactcatccttttttatggctgtgttgtattccatggtatatatgtgccacattttctttatccagtctatcattgatgggcatttgggttggttccaagtctttgctattgtaaatagtgctgcaataaacatatgtgtccatgtgtctttatggtagaataatttataatcctttgagtatatacccagtaatggaattactgagtcaagtggtatttcttgttctagatccttgaggaattgccacattgtcttccataatggttgaactaatttacactcctaccaacagtgtaaacatgttcctatttctccacatcctctccagcatctgtttcctgactttttaatgattgccatcctaactggcatgagatggtatctcattgtgattttgatttgcatttctctaatgaccagtgatgatgagcttttttccatatgtttgttggtcaataaatgtcttcttttgagaagtgcctgttcatatccttctcccactttttgatggggatgtttgttttttcttgtaaatttgtttaagttccttgtagattctggatattagtcctttgtcggatggattgattgtaaaaattttctcctattctgtaggttgcctgttcactctgatggtagtttcttttgctgtgcagaagctttttggtttaattagatcccattggtcatttctggcttttgttgccattgcttttggtgttttagtcatgaagtctttgcccatgcctacgtcctgaatggtattgcctaggttttcttctagggttttgatggttttaggcctatgtttaactctttaatccatcttgagttaatttctgtataacgtgtaaggaaggggtccagtgtcagttttctgcatatggctagccagttttcccaatgccatttattaaatagggaatcctttccccattgcttgtttttgtcaggtttgtcatggttgtagatgtgtggtgttacttctgaggcctctgttctgttccattggtctatatatctgttttggtaccagtacaatttttttttggttactgtagccttgtagtaagtttgaagtcaggtagcatgatgcctccagctttgttctttttgcttacaatcgtcttggctatacgggctcttttttggttccatatgaaatttaaagtagttttttctgagaagaaagtcaatggtagcttgatggggatagcattgaatctatacattactttgggcagtatggccattttcacgatattgattcttcctatccacgagcatggaatgtttctccatttgtttgtgtcttctcttatttccttgagcagtggtttgtagttttctttgaagaggtccttcacatcccttgtaagttgtattcctaggtattttattcactttgtagcaattgtgaatgggagttcactcatgatttggctctctgtttgcctgttattggtgtgtgggaatgcttgtgatttttgcatattgattttgtatcctgagactttgctgaggttggttatcagcttaaggagattttgggctgagatgatggggttttctaaatatactatcatgccatttacaaacagagacaatttgacttcctcttttcctgtatgaataccctttatttctttctcttgcctgattgccctggccagaacttccaatactatgttgaataagagtggtgagagagggcgtccttgtcttgtgctggttttcaaagggaatgcttccagcttttgcccattcagtatgatattggctgtgggtttgtcataaatagctcttattattttgagacatattccatcaacacctagtttattgagagtttttagcatcaaggggtgttgaattttatcgaaagccttttctgcatctattgagataatctgtggttcttgtcatgggttttgtttatgtaatggattatgtgtattgatttgcatatgttgaatgagccttgtatcccagggatgaagccgacttgatcgtggtggataagctttttgatgtgctgctggattcggtttggcaatattttattgaggatttttgcatcgatgttcatcagggatattggcctgaaattttcttttttggttgtgtctctgccaggttttggtatcaggatgatgctggcctcataaaatgagttagggaggagtccctgtttttctattgcttggaatagtttcagaaggaatggtatcagctcctctttgtacctctggcagaatttggctgtgaatccatctggtcctgggctttttttgcttagtaggctattaactactgcctcaatttcagaacttgttattggtctcttcagggattcgacttcttcctggtttagacttgggagggtgtatgtgtccaggaatttatccatttcttctagtacctttttaaactaaaaacatattttactttttataatatactttgcatatagggttgttttgtctatatctgttttaatcacatagtgtgattacataataagctcctagtaaccctttgatatggtttggatctgtgtctttgcccaaatctcatatcaaattgtaatctccaatgctggaggtggggcctggtgagaggtgattgaaatatgggggaggtctctcatgatataacatcattgcccttggtgctgccataatgattgagaattcttgtgagatctgattgtttaaccatgtgtagcacctcccccttgctctcttcttcctgcctccatcatgtgagatgccttgctccctctttgccttcctgcattgtaagttttctgaggcctcctcagaagcagagcaggtgccagaattatgcttcctatacagcctgccaaaccatgggtgaattcaacctcttttctttttcttttttctttctttttcttttttttttttttttttgacacggagtctcactctgtcacccaggctggagtgcagtggcatgacgtcagctcactgcaagctctgcctcgtgggttcactccattctcctgcctcagcctcccgagtagttgggactataggtgcccaccaccatgcccggctaattttttgtatttttagtagagacggggtttcaccgtgttagccaggatggtctcgatctcttgaccttgtgatccgcccgcctcagtctcccaaagtgctgggattacaggcgtgagccaccatgcctggcctcaacctcttttctttataaattacccagtctcacatatttcttggtagcaacatgggaacagactaatacacccttatattcagtagaacaaactagaaagtaagcagttctaactatgtacctgatgtgaagctcaggacaaaaaacagagctatgaagataatgcctggaatctctcccagcacggccaagaggcatagctgggacatggactggctttgctgtggttacatcacttgaactcagaatctaagagctcaaatctaaagacataagcctacagacaaattaaggaaatgtatatatgcagagcagctgtttgaagaccttaagacatctagtagacattataaacctgtctgccaacagacccaggcacaaatatctaaattaaattctgaagacatttctactttattttaccaataatttaaaaactatctttatttaaagattactaaaattgcatgaactgaaaagcatttgtgcttatttactttatttatgtgtactcatttatctttacattaaattgataccatgtgtaaactatatacaaacatatggatagacatatacatatatgtaatgtaacatattgcatatacatctacccataaagataaagggtgacaaaaagactgtagggttttaattttaggactttaatcatgggatgggtaaaactcactattttaaaaggacagttggattcaaattgtgcctttgtaaatgaaaaaggtaacatttatctgaagaagcccttactgagttttagaaaaaatgggtagcaaatttacctctcaaaacacagaaagggatagaatttaagcttttacaagaaggactttggatgtgttcaagaaaggttaaaaatagatgctaaggtaacacaaaaaagatagaaatttaccataagattttataaggaaactaattttattttaataggtagctttaatttggtctctgtttaccaactggaccactgagctcaggacagagcccattaaagaagagggatgacaaagtctttgcaatttttagatcctaataatttaaatatgtgaaaagaagacacaattggaagggagaggacctagacctttaaaaatcaaggatttcactgaatcccaggtccccaagaagagtaaaatgccatgggaaccataatgtgcaacacttccacagtttactttgctacaaaggcatttttttcattgtttgaactgtgtctttcttatctaaacatgcaaagatataagtagtcttctgaagtagtattcatttattataaccactgttagtcacctccaaaaccatagatttaccactgacccagcagccagcacacacacaagatgaagtatttgtacagtacaaagtaatcgctgatgaccctaaaagccagaggtcaggtaacacaacagaaaacagagcagggttttagaccagaaaggaatccattcactcgcaactcttggggttccatgtggaaaaacacagaatcttcccaaacagaaaagtctgtggcatctttcctgtttttcctaagtggtcccaggctgttcagaattctttaggtcccttcgtgtggcatcaatggtagcaagagggagataaagagaggaatgaataaaagaacaattgttaagaaaggaacagagagactaagcacatgatttaaaatgattccagtcacctgaaaaaaaaaattcaagaaacaaataagaaaagcagaaaagtgaagcagcatcattgtctggggtaaattcccaagatatattgtctcatggccacagaaaactaggtttagagtggaagtttaataggtgaaagaaagagaagaactctctgcagcagagagtggtcctggagaaatgggttgctgcttctgtggtgaaaagcagcaggttttatagatgagcttgaggaggtggtgtctgatttacgaagggcatgagatattagtcagaccaggtgttccatttgcataaggtgcaaaaagctggttagggctaggtgtgccatttgcatagggtgtgaaaatctggccgcccccaccctaatcttttattatgcagatgggttttctacctgactggcaccatgttgccagtttctttaccgtacatgtggtgaaaaaaggaaagatggaacctccatgtagaacatgtctgccccccacccaccggtagctcctttctattggcacagctgctggcattcacctgtgcaagattccagcttgcttatctatttctgcagttcgatttttcaggctgctctttgttagaaaagaaatgatttgggggctgcttttttattgaaagggaaatttcaccaaggactctgttgcttttactatctgcctaaatatcttctttctatctcctgtatcatatttccccccttaggagtagtaaccctaactgctgttaaggggtgttggacaatgactctttctggctatttcctgctgaaaaggggtgtagtgtgggaaacaacagttaagtctcctcctgaggtcaatctaagtgtcctcagaagagatgcacgtccatgtgtggttccattgtgtgccgcaccatttggagtttaatagcttctagatgagaagagataaatgttacaagatggtttagagtatagaatttgaatatgagtattaagattatcattattagttggggtactacaggccacaaccatgacagtagagtttgatacctgttagctgttccgatgggttgtaatactgatttcctccaccagatgtcactgcacctcaccagaagtgttaatatagaaacttttttttttggataagtggcattggattgggtgttgggagtaactttagtgttaactttggctaaatcttttctgtaatgattagtcctgctataaagatgataattaagcagaatattacagcaattagaattttccatccagagtttcacattgtgagtgccacagtgtatagtcatgctgcaaatagtagagtgagtataacaattcccacaagggtggtgtagtaaataattttcatgtaaaattttactccccaagatatagaatttccctttgggggtctatgaaattacaaatgtaatcccatggataatcaaaatctccctgcaagtatgtgtcaaaaagaagttctagtatgtggtggtgaatcttgagaggaaaggtagaaatgacaaagtatctggtgaggtaggggtgggactgaggaggatgagtagacctcactcatttacttatctcttatgatttttagcttaagttctcctctctcttcacattgatatctgggacattcctctaggctgtcaggagttgctccctcagctttccagactttggctcgagcgtcacgtatccaagagtcaataactgtaacttttaccactgagggtgttgaaagaacagtgtaaatttcttcccagcttgagcttagggaaggagagagagaaaggagagctttcctaataccaaatctcctgggttaaataaaggtggtcttattttctgtagttggacttctgctagttgtgttaatttctgtggaaagtgagccagagaagttacatgtttaaccaattcagaggtttaatagaaaattattggtaaggccgggcatggtgtctcatgcttgtaatcccagcattttgggaggccgagtcgggcggattgcctgaggtcaggagttcgagaccagcctggccaacatggtgaaaccccatctctactaaaaattaaaaaaaaattagccaggcatggtggcaggcacctgtaatcccagctacttgggaggctgaggcaggagaatggcttgaacctgggaggcagaggttgcagtgagtggagattgtgccactgcatgccagtctgggtgacaagagcaaaactccatctcaaaaaaaaaaaagaagaaaaaaaagaaaatcattggtaaggaaaggtcatccatacagcattttgaaagggcttaggcctaactttgaaaaggtatttcttacccacagtaaagccatgggaagaagagtgacccaaggaaagtgggtttcttggaacaattttctgaggtgtcttttgataatatcatttgtcttttctacctttcctgagaatgggggtctccaagcacaatggagatgacactgtatgcctaatgcctttgagaccccctgtgtgatggctgccttaaatgaggggccactgtcaattttgaggtacttaggtagaccaaagcagggagttattttattagctaacacttttattacctcagaggccttttctgtaaggcatagaaatgcttctacccagttagtgaaaatatctacctataccaggaggtattggatgcccttcgtctttggcatgtgggtgaagtctgtctgccagtactcccctggatagtttctcatcctttaagtttgaggaggaagaagccgcctgttggaattatttttaagacagacttcacaagcattaacaacatgctcaactgtttttaataagttatctcctgaaaacaatctctgggcacactgataagttttatcatttctcaagtgaaaatcttggtgaaggatattaagggtgttccactggctggaggctagcaagtggagtttgccatcctctgactattgccatcctgagggctgaaaagtgtacccttgagagatggctcaatctatctctgcaggggagtaatgaggcttaatttttcttatggagccttcccagattagatagccttttagtgtgttaagatcctgaggctttcttgccattgacttggctgcctgatcagctaacttgtttcctttggctaattcatctcttcccttctcatgtcccttacaatgcattactgctacctcttgtggaaggaaaactgaggataataacctgttaatttccggatggtattttataggagatccattagtggtaagactctttccttccaaattgcagcatgaacatgtatcaggggaacctgccctcaatatttcaatgtaggttctttctatttttcataagtttcagctggctgagaaataaagagtacaaagagaggaattttacagctgggcctctgggggtgatattacatatcggtaggaccgtgatgcccacctgagccacaaaaccagcaagtttttattaaggatttcaaaaggggagggagtgcaagaacagggagtaggtcacaagatcacatgcttcaaagggcaaaaaggagaacaaagatcacatgcttctgaggaaacaggacaaaaggcaaaacagaactaccgataagggtctatgttcagctgtgcacgtattgtcttgataaacatcttaaacaacagaaaacagggtttgagagcagagaactggtctgacctcaaatttaccagggcgggttttttttcccaccctaataagtctgagggtactgcaggagactagggcatatttcagtccttatctcaaccatgtaagacagacactcccagagcggccgtttatagacctccccccaggaatgcaattattttcccagagtattaatattaatattcctttctaggaaaagaatttagtgatatcttccctacttgcacgtccatttataggctctctgcaagaagaaaaatatggctctttttgcctgaccccgcaggcagtcagaccttatggttgtcttcccttgttccctaaaatcgctgttattctgttctttttcagggtgcactgatttcatattgttcaaacacacatgttttacaatcaatttatacagttagatacagttatcacagggtcctgaggtgaggtacatcctcagcttatgaagataacaggattaagagattaaagtaagacaggtgtaagaaattatgaaagtattatttgggaagtgataaatgtccatgaaatcttcacaatttattttcctctgccatggctccagctggtccctctgtttggggtccctgacttcctgcaacaagcatggagaactaagaaagcatacttggagtcagtgtaaatgttagctacctttcccttgcttaattcaagtgttcttgtaagagctatcagttagctagttgagcatttgtgcctggagagaggggcccactttcagtaacatcattcagagtgactatgacatatcctgccttatggactctgctttccaaagaaatttccatccatgaagaggctgcagtttggattttctagaggaggttccctgagatcctccctggctatgcaggtctttaccacatcttcttcatagtcatgttcaggttcctcagcgtggaaagtggttaggtttaggtgagaacaagttttcaattggattgtagacccttctaacagcagaacgtaatatttaaggagccagctgtctgttagctgaaggcttcccctagaagacagcaatcttgctacattatgtggggtataaagagttaggccatttcaaagggtcaatttggtgaccttcaataccagtagggccattgtggcaactgctcagaggcatgctggccatcctttagccatcaaatcaatcaagttctttgctccgctgtagtccgctggctgttgagttggtcctcgggcttgagttaaaactcccagggctgttccctgcatttctgatacataaagattggaggccctacctatgggaaagctgagagatggtgccttaagtaaggcttgttttagctggttgaaggcctttcgagcttcaggttcccaggttagaaaatgagttttagccacttgagtttcttttatgaggtgatataagggatgttctatctcactgtacccaggtatccatagtctgcaaaatcctgtgatgcccaaaaatctttagttgcttgagggttttagggagtgggaaaaaggaaatggacttaatcctttcttcttctaatgatctggtcccttcagacactattaagcttaggtacttcactgaggtttggcagagctgggccttggattctgaaacctctgtctgctaagaaattaagaagagttttcagtgccttcctgagaagcttcctcagttgcagcacagagcagcatgtcactcatatattgcaagagcctggcctgaggatgggaaaactcagagaggtcctttgacaacgcctgtcaaaagaagtgaggactgtctcaaaatccctgaggcagcaccatccatgttaactgggtggtctggccagagggatcttcaaaggcaaacaagtattgagagtgaggatgtaatggtatacagaaaaagccatcctttatatctaggattgtgaacaatttagttccctcaggtatttgagttagcaagatatagggattagggaccacaggatgaattgcgactgtggccttattaatgaggcagaggtcctgaactagcgtccatgccccactgagtttttgcactcctaatattggggtgttgcaggggctgttacagggtttgaggaggactcaacctattcttccttgaacggcccacgcttctggattaatattcgcttccactgggggagacaaagtgtttatcctggggctgtaaggatgttggcccccgtgtgattaaaaatatttctacctaataaaggagtgagactttcagacatacttaagaaggcatgtataaataataggtctcccactctacaactaaggggttgagaaaaatactgggttagaacctttcctgagatgtctatcacagtcatgctacaggaagaggggaggcctggattagagagaagagagaggctgcctccagtgctcagaaggaggtccacgcttcttttaatttccagtatcacctggggttcctgtgcagtaatggcagcttaagctgctggagccaggggtttgaatcctgggacccatccgtcccattggaccatctgtgaaacttattctgatctcagtgacctccatctccagggggagtctgatggaatgggcgctgtccaggttgctgccctctcctgaagcttgataatgaggaacactgatgtgtcactacagaggaggctgtgggaaaaagctgtttctcagggtggcctggatcacaagttggcggcacttttgacttggctggacctgtgaattacaggaattctgcttcatgtcagcaaccagctccttcaacttcgtgttcctctttgtagccgattctcttggcctgattcctgagcctgttctagagtcctcctcacaatacctgatggtcagggctgtgtgtggagacctaatgaagggtcttctgtgctcacacagagtgtccaggggacaggcttcatgacctcccctgcctcaaccccacaacaagatctggatagtgggccgggtcagataaagtcagaatccccagcatgggtgtgtgtcctggcagtgctgaggtctatgccccagatgaaccctcagtctctttgcaaatacatttatgttttgcatgtgttgttggctggtcagtctcatgtctctaaattcttgtatcaccctgtggataaggtaatagtctgcatataagtatataaaagctatctgatcagggtgggtgtgttttacatagtggagttatttttcaccaaagacgtttcaaaaagctgtagtagaatgtatgtatagacacacatgcatatttatatgtgttagatgttaatatatatttctataaatatatgtatatttatagaaatataaatatatattaaatttatatataatgtgccattttaaccactttaaaatgtgcaatcaaataaaattaaccacacacacagcgttacattaccatcaccactatttttcctagaaaatttttatcattttaagctaaagatctgtatcttttaaacaataactccctattttttccaccctagaccttgataatctctagtctactctctgtctttatgaatttgcctatttttgatgtttcatataaatggaatcatacatatatgtcattttgcttctcgcatttttcacttaccataatgttttcaaggtctatgaatgttccagtgtgtgtcagagttttgttcctctttatggcagattaacattctgttgtatgtgtcaccacatttgtttatccatgtgttgatgaacacttagattgttttcatattttatcttttgtgaataatgctacaatcaacattcccatgtgagtacctctttgagtccctggattcaattctttgggtatatacctaggaatggatgctgttttgtatgagaattctatgattagcttcttaagggacagcacaactgtttctcctagtggctgtacctttttataatctcaccagcaatgtatgaggattctaaattctacataaggctttcacttgttatttaacattttaaaagaatggtagccatatttgtaggtgtaatgtggtatctcattgtggctttgactttgtattttcctaatgactaatgatgttgagtttcttttcatgtccctcttgatgatatgcatatcttctttgaagaaatgtctatttgagtccttttcccatttatataaattgggtggtttgtatttttgttattgatttgtagcagttctttatatattctgggcatgaaaccattgtctatgtgatttgcaaatattatctcattctgtgtttggtctttttattttcttgataatatcctttgatgcacaaaaggcttgcatctttagcccaatttatctatttttcctttttgtttctcatgcttttgggtcatacctgagaatccattgcacatttgaggtcattaagttttacccctatgtctttttctaagatgtttttatggttatagatcttataattaactcactgatccatttttagataattgtttgatacggttggagtacagttctctaagtttattgttttgcatgtggttatctagttgtttctgcaccattacttgaaaggatgattgttcctccattaaattatcttgacacccttgtgcaaaagcaattgactttaagggtgagggtttatttctggactgtcaattctatccctttggtctctatttgtattcttatgccagcagcttctgtttttaatagttgtaatgttttgtgagatttcaaataagaaagttcaagttctgcaatttattttggcaaaattgttttggctatttcaagggtacttttttgaaaagcaaggaggccaatgttttgcaattgggaaagccttttctgtcttgttttggaggcaaattttgctgtctagggatcttttcaagaactttatcaaagtaggtgaattatcaccacttcctttgctgaggtactgtgttaaaatgtgtgttgcctcccgttgaagaattgagagaccctggaagcacttgcccatgtggtgaaggacagtgagctccataattaggggcacagaagacattgctttgggacacaatgttgtcagggtagctgtgtgcatctctacttgtttatttttttgtacaacttgcatctctgctggacatactagatattgaaatctttgttcattctcttggttctgggttggctgacctgtcagctggagctggaggacatgcctggcaggggagtgacccccatgggaaaaagcagggctcagcagagtgaaggcagctgggacccagagaagccagggaggtctgactcttagaagtcaaagaccagcaggtgggtgtcctcaggggcaaatggactgcactggtacccattgcagtggacttgaaaaaggtaagaggctttgggtatctcattttctctctcagctcttcagcaggagatttgggccctgggctggtactgtcctgcagcaggggcagggtagacaggaatggctgcatatcaggcctatgtccatgtcatcctctcaggcattgccactgaagatggagaattttgtacagaggcccagcctgggcacatgggaggagccaccttgttaaaattaatttaagaaaacagtatgcatgctttattcttctagaataattattaatgtcatgttttacaatgtatctcttaaaggaatggtgagaatcatctacataatgtatgttttaagtggtcttttctataattgcagctttcatatgttcttatagaaaccattttctttgggaacacacaggcagtatctctgtgttcatttctactgggaaatatttatgcagggtggagagagtcacatttcctaatgagagatggaaagcatctgactaccagaaagtgtccaaatgctgctgataatgatcatggggctgcaggtggaggtcaggctggaggtgggtgtcagggaaagtaattttgagagtcttttttttttttttttttacaaaatcatgggcagaagccaccacctggacccaacacatgttggaatggatgagggacagaaatagagctcagtaaattaagaatgaaatccaagagtgggcaagaggtttgagaggtcgacgggtgtgagaggtggatgggtgaatggtgagaatgttcaaaacatcttctttctccataataagggagcatttaggcccctgagtcagacagtgtccaggacagggggagcaggatgttgtcagctctcctggccaaaagtgagactccagcagtgtccagttacttggtccattttgggatttattaatattttaaagatgatccaacagtatacaattttgaaaatatacaaaaatccctatgctaccattcatagatagctaagatggccctaagatggtgagagaagcagaatggggtttgggtttacattgtatatttttttctcccaatatctacagaattccctacatcccactttgtaatgtaacccagtgggtgtcattcccattcgcagttacagacctttccggttcatggttacagacccttggaaaacccataccatttctgctgtgaggtacaggcagccatgtggcatcatctctaaacatgccttctgggacatcaaattgctgattaagtaaaagccatttcaatcgatattgaagacctcaattttaccactctcacacttgtaattcttctaccaagaggtgatggattttagtggtgatttgcttttatagattagtgtagattaatgcttctgccacgggcaattttttcattcggaaaagcatttggcaaagtctggagacactgctggttgtcagagctgggggagggagtcctgctggccttgagtgggtagagtccccagatagtgctgaacattctagagctcacagagccccaccagcatgaccactacaatgttcaatgctgaggaggagtggagagccctgatatgcctcccctagcttctctggagctttttaccttctccttccatcagtctctaccactttctcacctcagcttgctccttgaagcttaatgccttccacttgaacttgcccttagtttaagacctgctgtaatttctcaactcccctggcccctttctgatccttagcagggtgtcctctagagggcaccctcacctttcctgtagcttcccaggatccagatgcacctgccctgtgtgggcaccagggatacggccgtgtgcctgtgtccctaaaggtcctgtcactcacgaccttcgtgtgagagcaactgaggtgatattaccctcccctacttttcttggaacataaaaatttgtgcaaaccttgtagagtaaaatttcttaatgcatgtgaaaatttaaaatatatatatttttgcctcccaaactttactgggaaaaatttatcacggtcacagtcataaaaaatgacacctaatcagagttattcactgtattgtttaacagcaaaatattgggaacaacctagactttcaccagcacaatgctaattaaacaggttaccttatatctatacaacagaatatgatgcagctgcataaaaagtatggaatctttcagctatgcatatggaaacacctccatgttctgttttaattatagcatctaaacatcacagaataagatgaagtttttgtactagatctgaccttagaacattatttttactgtttttttgttttgttttttttaagagagagggtctcactctcataccgaggctgaagtgcagtggcaagatcataattgactgcagcctcaaccttgtgagctcaagtgatcctcctgcctcagcctcttgaatagctggaatcacaggcacttgccactatgcctagctaattttttgtgtttgtttctgtagagatggggtttcacccaggctggtgaaaacccaggctggtctcaaacttctgggctcaagtgatctgcccactttcactcccaaaatgctggaattacaagcaagtgtcatcacacctgattctgccttttttttttttaattggactgcagtctactcactcatcacttttcccatcaggtgatttctaattttcctctatttctctaccatatgtccatgccaaaatccagatgtatttgcttttgtctagaattaattttttttgttgttgttaaagagaagccttagaaatggtctcctagctgattttcaggattctaatcttcactgtctaagccataggtttccaactctggatactgattagagtcacttgcagggcatttaaagcctaccaatgcctgtaccatccctcaagtgtatctgatttcgctgatgtgtggtgtggcccagggattggttgtttaaaaatgctttcaaggaaaagggtcattttgcagtggaggaactttagcccagtgatcaaagttaacatccccagtaatcagagataacgacatcttagggcattctaaatatgatggatggagaaggtgcagcatcacccctgtggtattcttgtacaaagcatataacctgagtttaatcataagaaaatattagaaaagtccaaactgagggtcattctacaaaataagtcaccaacactcttaagaaatgtgaaggtcttaaaggtaaaagaaatcctgattaactttcccagattaaaggagactgagagaacagtacaatgaaatgcaatatgtgataccagattggatcctggcccagaaaaaggacattagttagaagatagaggggatttgaataaggtctgtacaggcattcattttacagtgttaataatcatttattgattttgatgattacgtgcatatctataatgttaatatttggggaagttgaatgaaaagcatatgaggactttgcctatttttggaacatttttgaaagtctgaaattatttcaaaattaaacataaaaagaaaagaaatatagatcttttagatatttctattaagttgccaaagttgaagaccatttcccagcttatcttgcctaatactgtcagagtaatcttcctggaaatgctgtttgtcatgtttgtgacctcaaagctttccagtgacttctcttatctgtaggatgaagttcccattatgtaggctgccattcagtgccctcatagcatagccctgatctcccttttttctgatctgtgttgaaagacctgaccaacattttactttcttatgtccaaaactgttcgaattttttcttgcttatgtaatgcccttccctgacttctcaactgtgggagttcagtcaaggtggtgggaaagattttagaagaaaaattataaagatagttataggaaatagtcacaaaccttcttggaaggccgggtggtttgcatagctttagtaaaaggtttggctgaaggcagctgaattatcttaaaagcttagggtgtagatacataggaatgtagaggagtttatctaaatagcttgtttactcaggcggacctaaaaccaacatttaatcctatgctcggggaactactcgggaggtcggcaatgtcaattaccttctagtggtgtttactcaagacctttgtcatttaatctgtactaaataaatgtgaacctcgctggctgatcagggctgcagctgctaactctttacccgaagggtctggccccttcttggtatcggtgagtagtgactcggccgcctagcctgctctttcgccagatatttgtgtctgagtgtatttgttcatccgttgctgggtcagggtctgctggttggacccagacagttagtgccctgtgtgaggacctggcatgttggtgcccaggtctgaggtatagctgcaaagaatcgggaaccctcgaaaacgaagaagactgtgcccttggtaagccagtaagtcagtaagtcagtaggtcattggtgcccgcttgggatctccaagttcgagggaattgttgcggctagggtttgatcatgggacaacagttatctgcacaacagaagcagtatataaaagtattcaaacagctgcttaaagccactggagcctcggttttgcaggctcaattaagggacctaatgcaaattgtatcacttaacccatggttcccagaagaaggtacactagacatagagctttgggaacaagtgggaagaaatttttttttttttttgagaccgagtctcccttcttcgcccaggctggagtgcagtggcgcgatctcggctcactgcaagctccgcctcctgggttcatgccattctcctgcctcagcctcctgagtagcagggactacaggcgccagccaccacgcctggctaatttttgtatttttagtagagacggggtttcactgtgttagccaggatggtcttgatctcctgaccttgtgatccgcccgcctcggcctcccagagtgctgggattacaggcgtgagccaccgcgcccggccgaattttttttttttttttggagacagagtctccctctgtcgcccaggctggagtgcagcagcgcgatctcggctcactgcaagctctgcctcctgggttcacgccattctcctgcctcagccccctgagtagctgggactacaggtgccggctaccacgcccgactaatttttttgtatttttagtagagacaggttttcaccgtgttagccaggatggtctcgatctcctgacctcgtgcgcaagagcaatgggtcccagtataatctttaacgctgtgggctttagtgagggcgactctggtcccattatacacagaagatcctaaaaaggggaaggagaaagaaccgtcacctattttaccacccctgagtccctcagccccactatcaccgggccaaaataacaaagaggaaacgaaggttttgcctgagacccctcctccaataaataagaaaaaagacaagggatacactacagctatgggaccctgtcttaagcaagcggcattagaaggggagcttttagcctgcccggtgatgcaaaatcactaaggtaatcaggtgtatgtttataaagagataaggaaaggcattaatggggtgcagcacaccaacatggcacatgtatatatatgtaacaaacctgtacgttgtgcacatgtaccctataacttaaagtataatgaaaaagggagaaaaggcattagaagccgaagctgcgcagccaagcgggcggagggcgaaaggaaagcctcagctgcaaaaaagctcgcagcgcccaagctgacagggttcggccaggccagcagcatccgcaccgcggtgggaggagggagcggtgcagacaaaaagccgcacagacaaaaagtggcgcctaaacaagcacagtgcggcggccgcccaggacccgcccggctgccctccggctccacatggggcccatggtaaaatcgcatgtgttctttgtatacaaggaacatcccaaattataattctctgttaaaatttaagttaaatttaaattataattatggccactgtttttcctctgctacccctgatatggctctctcaaaatcttaattgggtaagagtgacctctgaagggagaaaaattacaaagagcccataaattagttgaggaacgattaaaagccggccatatagaaccatctaacagcccttggaattcgcccatttcgtcattcccaaaagtctggcaaatggaaacttttgcatgacttacgtgttattaatgctaatctacagcctatgggaccccttcccccgcggcgattcctcaagattggtctataattgttattgacttaaaagactgtttttatactattcctctcgcagaacagagaaaaatttgcgtctacattaccagctattaaagtctgtcagattttacactgataatgctttttctttttatgtgcagaataaagacaagatgagaccaaatattcttccccctacttgtctcttcctacctgctttccctcctttaagaagatgtgtaagtgccaggcctcctgaaaaccacctcaaggacacaacaagccatagagggtttctacaacttgtgtttttccagggtatgccctcaagctctggtccaataaacctcaattgattcagacacaaacctcaactgattcagacacttgaatcaggcactcaatttggttaacattttgccaaccatgaagggggtcctcttaatggagtttagaacctttgacctgcagtgcttcttttgttcatgctcagtaccaactatagagctttagttgtgaccagtcatgtgactttctgagaattggatcctactttctcttgaggtccctgctctctccgatttttttgtttgagatctgagttttgtttcttcatggaactcctctcctcatggagctttgctcacttcctaaaaggaacatgagtttcctgctcctgtgacaatggagagccgactacagcttggtccctgctcaactaaggagctggtttggggtttttagaatttggtagctgcaggataaggcttattactacttcattctaacctctccttatgcttagagtgttcaacagtatgtaaatagtgcagtcgctatttgtgtttttggtttttatcattcttcctttggatttgaccaactcttcaccttgtctaatgtccagaacacctttcacttggtcaaatccaaatctaacaggagctctaaattatggtgaagcaggcctttaaactggctaaaattctgtaatggcagaacatccaactccacctctagaaacacctgtttgttgaagaaaataacaatattttaacccgcaatatatttctttgacaaattttgacatgtctgtcagagggccagcaaatagaagtggccctgcacagttgccttttgtggaaaaaatctacatcatagagaatcattattaatgcaggcatgtcttcccttatctggatctgggaaaaatggactgaatctgataccttaaagataaacaagtttagcattgatttttctctgagggctgctacctgcaaggttttactgacacaagaccagctttgctaactgaacttcctttctttctcccattacctgtattaccactaaaacctgatttacctccataacctcgttttggacatgcagaaatgcagaaaagtaatcagccagctaaagggtaaaaatgtattagtctcaagtttcctggcttccctctgtgcattctttccaattggatggtaaaaatcactgtttcctccaccaaattttgattaatgggagatttgtgttggactagtcttggtgtagtaattctggtgtactttttagtaatgttggggtatgagtattttgattgtttaatccatttcctcccagaagtagtcttttcctttatctctttcattctgtgttgctcataaagggaggtactggataaagttttctctcatcttgtgatatgtccttgagggcttgatttgtgaccaagtcagagcactcactcttggtctccaccatcagggggaggagtcatttttgagtcacattaggtgaccagctgtaacatggctgagaccctgaggttttttatttgttttgttttccaaatgtgttaagctcccaggagggcttgtcataagaagtcccatccaggctgggtgcggtggctcacacctgtaatcccagcactttgggaggccgaggtgggcggatcacgaggtcaggagattgagaccatcctggctaacacggtgaaaccccgtctctactaaaaatacaaaaaaattagccgggcatggtagagggtgcctgtagtcccagctactcgggaggctgaggcaggagaatggcgtggacctgagaggcggagcttacagtgagccgagattgcatcactgcactacagcctgggcgacagagtgagactccctctcaaaaaaaaaataaaataaaaaaaaaaaaaataaaaaagtcccatccatcagggacttttgtcattcccaagtcttgttgcttggatagggctgtggcaacaagagtcttttgctttcctaagcctattcctgagagtacatattttattttgtggtgggggaaaagatcattgggattggcttttcactgaagaggctgttggattgagtcacttagaatcaatacaccactggaaattctaattgtccatggccagaagatggattctttaaattgggacatctaagttaaaaaatattttagagatctcttattccaaacagttgatcagaggattgaatttcaaagaaagacacctgatagtgttatggctagccttaaaatttcttttgactaaattacagagcaaaaaatctcacctaaaacaaagttatttttttgtaagctcaaactgcttgacttagatcatctgagaaaataagaatagaagccactttaccttgtcattgaatagttaaaatcttatgcttttactgctgcagcctggatttaattttgggtcagggaaccagccttacttgttctgatatttgtgtgatttttgagtttttgaggtgctccttgacctctttggagatgcctcatacatccttggctaagccataatcttggttaaggcttattagtttcatttgggaggatacttttggttaaaaaaaaaaatcaaaagccagaaatatcagctgtttgtcctacctaaaatctgatatgaagaagtctgaggctgggcacggtggctcacacctgtaatcccagcactttaggaggctgagacaggcggatcaggaggttaggagatcgagaccatcctgtctaacacggtgaaatcccgtctctactaaaaatacaaaaaattagcctggcatggtggcgggcacctgtaatcccaacggctcaggaggctgaggcaggagaatggcataaacccaggaggcagaggttgcagtgagccgagatcgtgccactgcactccagcctgggtgacagagcgagactccatctcaaaaaaaaaaaaaaaaaaaaaaaagaaaatctgaaagtgtcacagtaggtagctggttagacatgagcagggcaggagagagctttccacccccacacactagaaatgtcaagtgatcatcaccaggtgatggtcaagtcaggtggttgttaactgtctctaaagtaataattggttgcaggtagtgccagggagatatagtctcacaatagatagaaaacacctgaaacaggtgatcagcagcttcccaataagttctcagaagttgagcaagtgggctcaaatatacacattaagaggcaacataatagagtttctggtatatgaccttctagggacttttttttttttttttttacattttagaagcatcattttttaggaactatgtttttaaattttttattattttattttatttttaaatctgtaaatcttttatttccataggtttttagggatttggtatttaattacataagttctctaggggtgatttgtgagattttggtgcacccatcacctgagcagtatacactgaattcaatttgtagtcttttatccctcacccccttcccaccattttccccaagtccatcgtatcattcttagatgatacagagcttagctcccacttacgagtgagaacatagtgtttggttttccattcctgagttacttagaataatagtctccagtttcttccaggttgctgcgaatgccattaattaattccttttatggctgagtagtattcaatcatatatatatactacaatttctttatccactcatttatagtttacattcgcaccagcagtgtagatgtgttcccttttcactgcttccacaccaacatctattatttttatttatttatttttgagatggatggagtcttgctctgtcgcccaggctggagtgcagtggcatgatcttggctcgctgtaacttctgcctcccaggttcaagccattcttctgcctcagcctctggagtagctgggattacaggcatgtgccacctcacccgggtaatttttttgtatttttagtagagacagggttttaccatgttgtacacactggtgtcaaacccctgaccttaggtgatccacccacctcggcctcccaaagtgttgggattacaggtgtgagctaccgcgcctggccaacaactattattttttcattttttgattatgaacattcttgcaggagtaaggtggtatcacattgtggttttgatttgcatttccctgatcattagtgatattgagcattttttcttatgtttgttagccatttctatgtcttcttttgagaattgtttattcacattcttagctcactttttgatgggattgtttgtttgtttgctaatctgagtttcttgtagattctggatattggttatctttcagatatatagattgcaaagattttctttcattctgtgggttatatgtttagtctgctgactgttgctttgctgtgcagaagctctttagtttaagtctcacctatttatttttgcttttgttgcatttgcttttgggttcttggtcatgaacttttcgcctaagccaatgtctagaagggtttttccaatgttatcttctagaatttttatagtttcaggtcttagatttaagtcctagattcattttgagttgatttttgtataaggtgagagatggggatccagttttattctcctacattcggcttgccaattatttcagcaccatttgttgaatagggtgtcccttacccattttatgtttttgtgtgctttgtcaaagataagttggctgtaagtatttaggtttatttctgggatctgtattctgttccgttggtctatgtgtctatttttataccagcaccatgctgttttggtgactatggacttagagtattgtttgaagtcaggtgatatgacaccaccgcatttgttctttttgcttagtcttgctttggctatgtgggctcttgtttggttccatatgaattttagaattgttttttctagttctgtgaagaatggtggtggcattttaataggacttgcattgaatttgtagattgcttttgtcagcatggtcattttcacaataatgattctattcatctatgagcatggggtgcattttcattttttgcgtcatctgtgatttctttcagcagtgttttgtagtttttcttgtagaggtctttcacctccttgtttagatacattcctagttattatttttttataactgctgtcataaaaggggttcagttcttgatttgattctctgcttggttgctgttggtgtgtagcagagctactgatttgtgcgcattaattttgtatacagaaactttgctgaattcatttgtcagttctaggagctttttggaggagtctttagggtattctaggtatacgattatatcgtcagcaaacagagacagttttacttcgtctttaccgatttggatgccctttatttatttcccttgtttgattgatttggctagggctttcagtactctgttgaataaaagtggtgagagcaggcatccttttcttgttcccctgctcagagtgaatgctttcaactttttctcattcagtatcgtgttggctgtgggtttgtgtgccaattttgctgagagttttaatcataaaatgatgctggatgttgtcaagtgcgttttcagtgtctattgagaggatcatgtgatttttaaattatgtttatgtggtgtaccacattattgacttgtgtatgtggaaccattcctgcatccctagtatgaaacctacttgatcatggtggattatgtttttgatgtactattggattcagttagctagtattttgttaagaatttctgcatctgtgtgcaccagggatattggtctgaagttttctttgttatgtcctttcctggttttggtattagggtgatactggattcatagtatgatttagagagaattctctctctttctagcttgtggaatagtgtcaattaaattggtaccacctcttctttgaatgtctggtagaattcagctgtgaatctgtctggtcctggaatttgttttgttgttaattttttaattatcttttcaatcttgctgctttttgttggtctgctcagggtttctaattctttctgatttaatctaggagagttttacatttccaggaacttattcatcccctctaggttttctagtttatgcacataaacgtgttcatagtacctttgaatgatcttttgtatttctgtggcattcgttgtaatagctcccatttcatttctgattgagcttatttggctcttctctcttcttttcttggttaatcttgccaatggtctatcaattttatttatttttccaagaaaccagctttacattttatttatattttgtattattttgtttcagtttcatttagttctgctctgatcttggttattttctttcttctactgggtttgggtttggtgtgttcttgtttcttgagtttctagaaatgtaaccttagattgtctatttgtgctctttcagtctttttgatgtaggcattaaaggctatgaacttttagcatggtctttgctgtattctagatgttttgataggatgcatcactattgttcagttcaaagaatttttaaattttcattttgatttcatatttgacccaatgatcattcaggagcaagttatttaatttccatgtggttggttttgaaggttccttttggagttgatttccagttttattctactgttgtctgagagagtacttcatataatttcaattttcttaaatttattgagacttgttttgtggcctatagtatggcctatcttaaagaaagttccatgtgctgatgaatagaatgtatattctgtggttgttgggtagaatattctgtaaatatctcttaagtctatttgctcgagggcatagtttaaatctattgtttctttcttgactttctgtcttgatgacctgtctagtgctgtcagtggactaatgaagtccctcactattattgtgttactgtctatctcatttcttaggtctagtagtaatagctatataaatttgggagctctggtgttaggtgtatatatgtttaggattgtgatattttcctgttggacaagtcctgttattattgtataatgtccctctttgtcttttttaactgctgttgctttaaagttagtttttttgatataggaatggttactcctgctcactttgtggccatttgcatggggtgtctttttctacccttttaccttaagtttacatgacactttgtggttaggggagtctcttgagggctgcagatacttgcttggtgaattattatcaattctgcaattctgtatcttttaagtgaagcatttagaccacttacattcaatgttagtattgagacatgaagtactgttccattcatcctgctatttgttgcctgaataccttggttttatatatttatttattgtatttttgttttataggtcctgtgagattcatgcttaaagaggttctgttctgatgtgtttccaggatttgtttcaagatttggagctccttttagcagttattgtagtgcaggcttggtagtggcaaattctctgagcatttgtttgtctgaaaaagactgttatctttcctttatttatgaactttagttttgctggatacaaaattcttggctgataattttttttaaggaggctgcagataggtatgcatgctcatttgaggtgttcttcccttattaaagattgctaaaatcacatgtgttgaaaagcatttgggattatttacttaattgatgagtactcatttatttttgcattaatttgataccatgtataaacaatatataaacataggtatggacatatacatatatgtgatacaacatagaacatatacatgtgcacataaagatagaaggagacagaaatactttagatttttgattttaaaactatgcatagaacccataaaactcactattaaaaaaaagttggatttaaattgtgcttttgtaaatagaaaaagttaacatttatctgaggaagcccttgctgagttttagagaaagtaggtagtaaatttacatctcaaagcacagagagagagagagagagaaggaatttgggtgtgttcaaggaagattaaaaatagatggcaaggtaacacaaaaatgatagaaatttataacaggattttataaggagaccaattttatttccatacatagcttttattttggtctctattttccaactgtactccagggaacacactacacaggctcccttaagtgctggtgggccactgcacatgcagacagcccactttaagggaagaatcgggggagaagagatgcagaccccagaattatgccaacatacgaaagcctaagtcaaaggtcaaaccacacacttgaaatctcatcgcctgtttggccctgttttaagtgtactttactttctttaatttctgctctaaagcttttaaataaactttcactcttgctctaaaacttgtctcagtcttttcttctgctttatgactcttggttgaattctttcttctgaagaagcaagaattgaggctgctgcagacttctacagatttgctgccactaatatactttagtgccattctacatgatagaatatatatatattcttatatttatacatagatatataatatatgtattcatagaggccttgaatctacattcttgctccactttatgtaaacaatccaggtataagactaaaacttattttggaaatacattggtcccatatgatttctatttcataaaaatgggagacaggagggggaaaattatttttcagaagaaaacaacagaacaatggttattgaattttagatctgttctttttttcttgaactttgttatttacctacaatttggactgaatcctaaattttttcctggctacaaatttcaaaactaatggtttcagaattttcttccatttttcttccattttggtatattgtaaattaaaactgtgatttttaaatttttatctttttttattacacttttaagttctgggatacatgtgcagaacctgcaggtctgttacataggtatacacgtgccatggtgttttgctgcacccattaacccatcatctaccttaggtatttctcctactgctatccctcccctagtcccccacccctcaacaggccccagtgtgtgatgttcccctccctgtgtccatgtgttctcattgttcaactcccacttatgagtgagaacatgtggtgtttggttttccgttcctgtgttagattgctgagaatggtggtttccagcttcatccatgtccctgcaaaggatatgaactcatcgttttttatggctgcatcgaattctgtggtgtacatgtaccacattatctttatccagtctatcattgataggcatttgagttgattccaagtctttgctattgtgaatagtgctgcaataaacatatgtgtgcatgtgtctttatagtagaatgatctataatcctttgggtatatacccagtaatgggattactgggtcaaatgatatttcttgttctagatccttgaggaatcgccacactgtcttccacaatggttgaactaatttacactcccaccaacagtgtaaaagcattcctatttctccacatcctctccagcatctgttgtttcctgaccttttaatgatcaccattctaactggcatgagatgatatctcattgtggttttgatttgcatttctctaatgaccagtgatgatgggctttttttcatatgtttgttggtcacataaatgtcttattttgagaagtgtctgttcctgtgctttgcacactttttgatggagttgtttgtttttttcttgtaaatttgtttaagtttcttgtagattctggatattagtcttttgtaagatggatagattaaaccttgcaagctgaaactagacgacttatgtaaacttctggagaaatcatagcaacttatatataaacaacttttgtgcctgctgatgtggactacacaaaaggttcacatgaacactggattcagactgcaattcagaaatgtgtcagattgccgttgtaattggaagatgcttcagaaactctagaaaacctagtctatagactgctccagacattacaggtgagccaacatacaactgaaagggttcaagcggtgtttgccaaacgaattgctctaattgaagcagcagttgtgtgactttaataaggttccaggattatactgtcccttttttgctgtgacttccctttgcccttttctgatttgtcttcatccccttttccatggggcatgacttcttaagaatgagccttcctagtgatgtaggatgagatgaaacatacagtcacaaagtcatgtcttctacaatgctttctctgaaagcttttgaagaatcggggggccaggtgtgctggcacaggcctgtaatcccagcactttgagggtctaaggcaggaggatcacttgaaaccaggagtttaagaccagcctgagcaacaaagggagaccacgtctctacaaaacataaaataaatcaaattagccaggtgcagtggtgcatgcctatagtctcagatacttgggaggctaaggtgggaggaccgcttcagcccaggagttcaaggctgtagtgagtgcactccagtctgggtgacagagcaaggttgtgtctctaaaagaaaaaaaaaaaaaaaaaaaaaaaaaaagaaaagaaaaagaaaggggtaaacaggaaagccaaagatctcgagcatctccagatgattgcctgaacaaattgttttttcttggcttccaaacctttcaagatgtatattactttgtaaaagaaagacatgccaattgtaactttaagtgagcaatcaaaatctagctcctaaaactgaagtattttaactctcattctgataatttattttctgaggcacagaagaaagacaagattaggtcaattgtttttatgcccactccatctcttccaacctgccttctcccctttaatcaaatgtataaacactaagcctcctgaaacctcttcagagaaaacacaagccacagaggttttttgcaactcatgttttcccagggtgcaccatcaagctctggctcgataaaactcaattggtcaagacccttgcctcagtcagtcattctggataaccaccatgagtcctgcaaagcccttcagtaatctattgcctgcctaggtgatgtgtacccaggtgagtcaggtcttcatgagtcaaacactcgtcttccttttctgtctttcccaaccctaccactcagtgctgtgtgctctgatctgaccccagctcccaggttgtttgtattggtctaagaaagcaagaccaggaggggcaggttgagaaggaagtaagaggccaacagccatggaaagtggcaggtggggctgtcattgctcaaagccacacaccctgggtgcattttgtgaatttttctggattcggaatctttttcctgtgtgtctgtctagaaactcaccttcttcctactttcttctcagtacactttctgtttctagtgcactcatttatgtccagagaatggccatgcaaatagttgacaatagaataaaaaatgactttttatgagacttggaagctggcctttcttttttccaaaagagattgaggtttccataaaaactagcttttatgcagggctgtgtagttgtgagtgtagttttagggaacaggtgcataagtgaagggtgagacagaaaacaaaatgctggctgtttgtcaaatcctgaaagtaggggggctgaaatcatttttgaaggaggatgtcattcaggagaccttgtacatcttagagtgtcctcttaccagatgaagtggaggatgaggttgaattagggagttaggtgacagtgggcacatacttctctgcctcagttttttttttaaatctgtaaaaatggggatgataacactcaggattttttggtgaggactgtagttacctggaaagcccttaggatagtgcccggtgcatagtgagtgctgcatcagtgtgagctattataattatgggaataggcaaaggtgccaccctggccatccagagtggagaggtattttctggtcagggtccaggcaggccagctggagatgaagctgattagtggggaagcttaacttccaggagcggaagaatttaggaggagtaaacagaatgcacaacattctgtaaacatgcctttacccaacagtaggaatactcagagtgggtgtggcttccatggcaatcattatctcctgggaatctaagaatgtgtcctagagtcaagtggctttgatgtaagccaaacctggaaatgggcttcagggctgccttgcacatagcattcattcatcttgaaaaaggaaagcattcatcttgctaaaggaatcccctcttctggtccaggccattatttttgcttttgtactatcctaatttttaaggtgtaaggagaaagaccaaagaataaaataatgaagtacctgtatgaaataacagggtagaattgagactggtacgtgtaagttaagagaaattgtgtataaatttttgtgaacagaaaaaggatttcttgttgcaaactgacctctctatataaataatacccattgccttgaatggatggcagaccgcatcacaagaacattccagcagagtcatgagagaatgggtagtgtggcttctttaattggcaggttagactgagtaagttactgaagagaaaggagttgaaggagaagatgggtgagggcaagaaaaatgggaaggtgaaaggaaaggactgaaaggaatgtttaccaagggctcatcaggtaccaggctctgtgactaatgtcttacacatgttaatttactcttccactgtcattttctgatgcagtaagagtcagtcttacactacaggtgaggaaagaggctgagggaggtcaaatgagtggcccagggtcatccagccacttcatagcagagctagtgtgtttcactgtggtttgtgcagacagaaaagtgagacatagaaggaaggcaaaacatttttgttgtgggtgatgtttatgaaagtgacccgtatgaggcagaataatggcctcttaaaaatgtccacatccgggccgggcgcaggggctcacacctgtaatcccagcactttgggaggctgagacggtggatcacgaggtcaggagttcgagaccagcttggccaacatggtgaaaccccgtttctactaaaaatgcaaaaattagctgggcgtggtggcgggcgcctgtaatgccagctacttgggaggccgaggcaggagaatcatttgaacctgggaggcggagattgcagtgagctgagattgtgccactgcactccagccagggcaacatgagtgaaactctgtctcaaaaaaaaaaaaaaaaaatccacatcctaactcttggaacacatgcatttacttttcttggcaaaaacactgttcaaagttaatgaagttgagtatcttgagatggaaagcttattctggcttatctgggtggctcccagtttcatcataagtgtccttgtaagtgaaagagaaaggcaggagggtcagggtgagaaagatgcagcctgagagactccactggccattgcttcctgtgaacatgtgtgataagacaaaattacaactaatttagttacagatgtaattggcttttatttgtgatttatgatttggggcagctctccctctacagatgcctcagcatcccaagtagctgggactatattgcgggatctggccagcagcctgcaatgcaacggggctctttctttgttcccaggcagatcagcaggttgagaaataaaagacacacacaagatagtgaaagctgggtccagaggggtcaccgccttcttgtcctgcaatgctgccaatgcactggatataccagcatttattattaagtttagtgagagcggggttaggttagtgagggatttagggtcatttataggctctccacaagcgttgcattccattcccagagctatggacatctgcttttctgggataggaatcttggtaatgtgaaacctccctgactgcacgtctgttcataggctctctgccgggggaagcacatcacgtgctgttggctcattctggcagtccaacctggcatttgtctttacacaatcctgcatgcaattttgtatttacaataatcaggagcatttcatcttttattccatagcaatagtttcagggggtctccctacatctcccccttttctctgatttaaatgaaccatagcaatcatagcttggcactgatcacgattggattgaagaatatttttttccaattttacatatgaacaataaaccaatagcacaaattatacacagaacaaaattaacgatagtggatcctcccaaagatattacctattgaatggggttgagattagataacccctcagagatactgtctaaaacttcagcactgggtaaagcagttaagtgtgcttgagaggcttcaaaaatctgttcttttagcttgcttatgtctaaacttaaattatcttcacttccttgtaaatgggattttactgattcccaattatgaacagactcattatattggaactgagttatacaaaaatcagaagtattcctatcacactaaatttgtaatctatgttctaaactcataattctatctcccatccatataacagaagcacatcaagcgctgtaggctcattctggcagccaatctggcattgtctttacacaatcctgcattcaactttgtattgacaataatcaggagcatttcatcttttattctgtaacaatagtttcaggggttctccctacaggactacaggtgtgcaccaccatgcctggctaatttttgtatttttagtagagacagggtttcaccatattgaacgggctgatctcgaactcctgacctggtgatctgcctgccttggcctcccaaagtgctgggattacagatgtgagccactgcgcccagcccataaatcacacatttctttgagtttttgtaattccagcccaagagaaaccatttgatatttcaagaatggctgcacacaaatattttcacacaaataaaaacatctgtagattgcaccacacgagggagactaccagtatgactatcaggaggaaaatatcaagagtttggaatatgcaccttaggaaagatgcaaaccaactacaataggatagatcaaagaagaagccagaagagtctagtcattttaaccagtcagcaaatttattgatttttacaaccaagtctttataatacccaatgtatttatccatgtgcaacaagaagtgtcagaaactgcacaggctccccactgttcagctggtagagagcaattctattatctattattgcatgtctatgttaaattaaaaaaggggaggtgccaagatggccaaataggaacagctccggtctacagctcccagcgtgagtgacgcagaagacgggtgatttctgcatttccatctgaggtaccgggttcatcttgctagggagtgccagacagtgggcgcaggtcagtgggtgcgcacaccttgcacgagccgaagcagggcgaggcattgcctcactcgggaagcccaaggggtcaaggagttccctttcctagtcaaagaaaggggtgacagatgacacctggaaaatcgggtcactcccacccgaatactgcccttttccgacgggcttaaaaaacggtgcaccaggagattatatccgtcaccaggcttggagggtcctatgcccacggagtcttgcagattgctagcacagcagtctgagatcaaactgcaaggcggcaggaacccaccacagctcaaggaggcctgcctgcctctgtaggctccacgtctgggggcagggcacagacaaacaaaaagacagcagtaacctctgcagacttaaatgtccctgtctgacagcattgaagagagcagtggttctcccagcacgcagctggagatctgagaacaggcagactgcctcctcaagtgggtccctgacccctgatccccgagcagcctaactgggaggcacaccccagcaggggcagactgacacctcacacggcagggtactccaacagacctgcagctgagggtcctgtctgttagaaggaaaactaacaaacagaaaggacatccacaccaaaaacccatctgtacatcaccatcatcaaagaccaaaagtagataaaaccacaaagatggggaaaaaacagagcagaaaaactggaaactctaaaaagcagagcgcctctcctcctccaaaggaacgcagttcctcaccagcaacagaacaaaactggatggagagtgactttgacgagctgagagaagaaggcttcagacaatcaaataactccgagctacaggaggaaattcaaaccaaaggcaaagaagttgaaaactttgaaaaaagtttagaagaatgtataactagaataaccaatacagagaagtgcttaaaggagatgatggagctgaaaaccaaggctcgtgaactatgtgaagaatgcagaagcctcaggagccgatgtgatcaactggaagaaagagtatcagcgatggaagatgaaatgaatgaaatgaaacaagaagggaagtttagagaaaaaagaataaaaagaaatgagcaaagcctccaagaaatatgggactatgtgaaaagaccaaatctacgtctgattggtgtacctgaaagtgacgaggagaatggaaccaagttggaaaacactctgcaggatattatccaggagaacttccccaatctaacaaggcaggccaacattcagattcaggaaatacagagaacgccacaaagatactcctcgagaagagcaactccaagacacataattgtcagattcaccaaagttgaaatgaaggaaaaaatgttaagggcagccagagagaaagtttgggctacccacaaagggaagcccatcagactaacagcggatctctcggcagaaactgtacaagccagaagagagtgggggccaatattcaacattcttaaagaaaagaattttcaacccagaatttcatatccagccaaactaagcttcataagtgaaggagaaataaaatacttcacagacaagcaaatgctgagagattttgtcaccaccagacctgccctaaaagacctcctgaaggaagcactaaacatggaaaggaacaactggtaccagccactgcaaaatcatgccaaaatgtaaagaccatcgagactaggaagcaactgcatgaactaaggagcaaaataaccagctaacatcataatgacaggatcaaattcacacataacaatattaactttaaatgtaaatggactaaatactccaattaaaagacacagactggcaaattggataaagagtcaagacccatcagtgtgctgtattcaagaaacgcatctcacgtgcagagacacacataggctcaaaataaaaggatggaggaagatctaccaagcaaatggaaaacaaaaaaaggcaggggttgcaatcctagtctccgaggaaacagactttaaaccaacaaagatcaaaagagacaaagaaggccattacataatggtaaagggatcaattcacaagaagagctaactatcctaaatatatatgcaccgaatacaggagcacccagattcataaagcaagccctgtgtgacctacaaagagacttagactcccacacattaataatgggagactttaacaccccactgtcaacattagacagatcaacaagacagaaagtcaacaaggatacctaggaattgaactcagctctgcaccaagcagacctaatagacatctacagaactctccaaccaaaatcaacagaatatacatttttttcagcaccacaccacacctattccaaaattgaccacatacttggaagtaaagcactcctcagcaaatgtaaaagaaaagaaattataacaaactatctctcagaccacagtgcaatcaaactagaactcaggattaagaatctcacttaaaacaggtcaactacatggaaactgaacaacctgctcctgaatgactactgggtacacaacaaatgaaggcagaaataaatatgttctttgaaaccaacgagaacaaagatacaacatactagaatctctgggatgcattcaaagcagtgtgtagagggaaatttatagcactaaatgcccacaagagaaagcaggaaagatccaaaattgacaccctaaaaacacaattaaaagaactagaaaagcaagagcaaacacattcaaaagctagcagaaggcaagaaataactaaaatcagagcagaactgaaggaaatacagacacaaaaaacccttcaaaaaattaatgaatccaggagctggttttttgaaaggatcaacaaaattgatagaccgctagcaagactaataaagaagaaaagagagaagaatcaaatagacgcaataaaaaatggcaaagaggatatcaccaccgatcccacagaaatacaaactaccatcagagaatactacaaacacctctacacaaataagctagaaaatctagaagaaatggataaattcctcgacacacacactctcccaagactaaaccaggaacaagttgaatctgtgaatagaccaataacaggatctgaaattgtggcaataatcaatagcttaccaaccaaaaagagtccaggaccagatggattcacagccgaattctaccagaggtacaaggaggagctggtaccattccttctgaaactattccaatcaatagaaaaagagggaatcctccctaactcattttatgaggccagcatcatcctgataccaaagccgggcagaaacacaaccaaaaaagagaattttagaccaatatccttgatcaacattgatgcaaaaatcctcaataaaatactggcaaaccaaatccagcagcacatcaaaaagcttatccaccatgatcaagtgtgcttcatcgctgggatgaatggctggttcaatatacacaaatcaataaatgtaatccagcatataaagagaaccaaagacaaaaaccacatgattatctcaatagatgcagaaaaggcctttgacagaattcatcaacgcttcatgctaaaaactcaataaattaggtattgatgggacatatctcaaaataataagagctatctatgacaaacccacagccaatatcatactgaatgggcaaaaactggaagcattccctttgaaaactggcacaagacagggttgccctctctcaccactcctattcaacatagtgttggaagttctggccatggcaattaggccggagaagaaaataaagggtattcaattaggaaaagaggaagtcaaattgcccctgtttgcagacgacacgattgtatatctagaaaaccgcattgtctcagcccaaaatctccttaagctgataagcaacttcagcaaagtctcaggattcaaagtcaatgtacaaaaaatgacaatcattcttatacagcaacaacagacaaacagagccaaatcatgagtgaattcccattcacaattgcttcaaagagaataaaatacctaggaatccatcttacaagggatgtgaaggacctcttcaaggagaactacaaaccactgctcgatgaaataaaagaggatacaatcaaatggaagaacattccatgctcacgggtaggaagaatcaatatcgtgaaaatggccatactgcccaaggtaatttacagattcaatgccatccccatcaagctaccaatgactttcttcacagaattggaaaaaactactttaaagttcatatggaaccaaaaaacagcctgcatcaccaagtcaatcctcagccaaaagaacaaagctggaggcatcacactacctgacttcaaactatactacaaggctacagtaaccaaaacagcatggtacaggtaccaaaacggagatatagatcaatggaacagaccagagccctcagaaataacgctgcgtatctacaactatctgatctttgacaaacttgagaaaaacaagcaatggggaaaggattccctatttaataaatggtgcttggaaaactggctagccatatgtagaaagctgaaactggatcccttccttacaccttatacaaaaatcaattcaagatagattagagacttaaatgttagacctaaaaccacaaaaaccctaggagaaaacctaggcattaccattcaggacataggcatgggcaaggacttcatgtctaaaacaccaaaagcaatggcaaccaaagccaaaattgacaaatgggatctaattaaactaaagagcttctgcacagcaaaagaaactaccatcagagtgaacaggcaacctacaaaatgggagaaaattttcacaacctacttatctgacaaagggctgatatccagaatctacaatgaactcaaacaaatttacaaggaaaaaacaactgcatcaaaaagtgggcgaaggacatgaacagacacttctcaaaagaagacatttatgcagccaaaaaacacatgaaaaaatgctcaccatcactggccatcagagaaatgcaaatcaaaaccacaatgagataccatctcacaccacttagaatggcaatcattaaaaaggcaggaaacaacaggtgctggagaggatgtggagaaataggaagacttttacacttggtgggactgtaaactggttcaaccattgtggaagtcagtgtggtgatgcctcagggatctagaactggaaataccatttgacccagccatcccattactgggtatataccaaaaggactataaatcatgctgctattaagacacatgcacatgtatgtttattgcggcattattcacaatagcaaagacttggaaccaacccaaatgtccaacaatgatagaatggattaagaaaatgtggtacatatacaccacggaatactatgcagccataaaaaatgatgagttcatgtcctttgtagggacatggatgaaattggaaatcatcattctgagtaaactatcacaagaacaaaaaatcaaacaccgcatattctcactcataggtgggaattgaacaatgggaacacatggacacaggaaagggaacatcacactttggggtctgttgtggggtggggggaggtgggagggatagcattgggagatatacctaatgctagatgatgagttggtgggtgcagcgcaccagcatggcacatgtatacatatgtaactaacctgcacactgtgcgcatgtaccctaaaacttaaagtataataataataattaaattaaaaaataaattaaaacagggagtgagaataggtaagtatagaagtggaagcctaaaaaaaactccatacatttgaggaaaaagttgtgttacagaggcagctaacatcagcctttgggtggactaaaggatctctttttatgtaaaaatgcgtgggctgggtgcggtggctcacgcctgtaatcccagcactttgggaggctgaggcgtgcagatcacctgaggtcgggagttcgagaccagcctgaccaacatggagaaaccctgtctctactgaaaatacaaaattaggtgggcgtggtggcgcatgcctgtaatcccagctactccggaggctgaagcaggagaatcaattgaacccaggacgcggaggttgcagtgagccaagattgtgccattgcagtctggcacgggcaacaagagcgaaactccatcttataaaaaaaaaaagtgtggttgacatgatatatcggacactgttaacttactctcagaagctacttcttgtgaaatcctaagtacagcattattctgggaagcaaaggagacaggcagaagcaaggacaaattaagagaggtaacagtctcatcatgactgatagtcttgttctaacatcttgagaaaagctgtccacagtgtaaagtcatcaacttgtcgtggtttgcagtttgagtgtctctaagttatggtgttgaacatttggtgagctcttagtggcccacacttcagacacgagggtttctccatgaaatttacattgagttgtccatctccatcttatatggcttcaggaacagagctgctcttgttcttaatgatttcactggagaaaattaaattggaagaactaaaagaattcagggtccagtccagtctaccagtggattataagtactcaaagataatgaacagtggttcaatctggtaacaggtgtactacagtttttcttttcaacatagtttttctctttataggagtctctatttttaccaaagataattccagtaggatgaactcttttgcaaaataggttgagtctcaccgaacttgcccagattttttacctaagtgcggcaagagtagcgatggaccatagaggctctttttaaactcccctttgctggaagtttttagtaagaatctcagattaaacttccaaaaacctcttgagactaagaagccaaaccaaggccaacttcagactttgcctgcattccctatgggtttattctatgtatattctcaaatataacatcccagtcaaagccttggtaatataaccaatgttttcaaatgtgtcctgttataaagagagcagatccttactgaacttgtgcagataactttattaccataaacatatgaatactcctgaatagtttcccaattctggggcacttagggagcaaaagcaaatgtttcaatttttgtttacaaaagtatactttaccaattgctgaagaaaaaaagtgcataaatctggagaataaaacattcaaagaatcagcacattttcaaatagaaaattatgaaaacattgttttgactatttagtccaataaaattgggtttttttctttgtcttgaatttcatgaagtatcagcctgttcattaaaattttgaaagttcttagtccagtggtatgatcttgaagttatcaggaacttgtattcaagagtccttgtcagagtcttttcataaatctccttgaacaaaaagcaattttggactgtagctgatggtaaatactttgaggaagaatgaaagcaactgtctgggaatgacaaagatttaaaatgactatggttaaaaatctaatgagaatttattatggtaaagacacagctcacaaaatctagttacttctgtggcatatgacactatgataacatatttgatttccagaaatttcatataatttttagaatactcattaaaaaaattttttttttgagacggagtctcactctgtcacccaggctggagtgcagtggtgcgatcccagttcactgcaagctccgcctcccgggttcctgccattctcctgcctcagcctcctgagtagctgggactacaggtgcctgccaccaagcccggctaattttgtttttgcatttttagtagagatggggtttcaccgtgttagccaggatggtctcgatctcctgaccttgtgatccgcccacctcggcctcccaaagtgctgggatgacaggcgtgagccatcgcacccagcctagaatactcatattattaacattcccataaatattatttagaggaggtttagcatcacttatcacttatttgaaaatgctttctatataatttaacttatcaaataaagtggcttttccattcagcttctgtttgttaactggattactgagttcttggtgtagcccattcataaatagggccaaaaaagtatagtcttatgtatgttgaaaaaggtccttaggtaattccagtacttccagctgaacatcattgatttagttttaagttctacctattacaacaagagttctccatccttgttacatgttagtagtgtcagggaagacttaaaaattaccaatgcctgggtccctctccagacctttaaactggaactaatgggtggggcttgagcatccacttttaaaaatgttttccagtgattccaatgtgtagctctatttcccatcagatttctctgatttcttgtggcattcaattttttctattttggtatcatgattattttcaggtctcatttcctgtcttaggctttatgtctcctggcgtagggaccttgccttcatcatttctgtatcttttttaaacacatgaactggtcatcaggaaaagatctcaaccacacataggttgtgttctgagtctcaggttcacatgttaatcctaaagtcttagttctccacgaggtcagatgttgcttgtgatgaagggtgtggttaagtctgcagtgcagatggtagaggggatttcactctgttttcagacatagcattggaactaagaattttatatctatatgggtgaagggacaggggtgtgtaggaagacagttctaattaggatggaggaattatactaggaagtagcggtaaaggaagtgagaaggcttagtaaatagaagaaatgtgaacttatcaaagtggctagagtagacccctggagattcttgattaagtgaattaactagattttagaaaggtaatgaggcagtcatatgcaaggaagatttcaaagtctggagacaagaagtcaagcaatactttgagaagtggttgagctttatgggaatggagagaattacactattgagagatgttaaaaataatgaagagggtttcaccatgtgaaattgtgtttttcatttgaatctgagaaacaaatgagcagagagagaggctggagataattatgtctaaaagacagtggggtacagggagcataaaggccagggagaaagggaactgcaggaattagtgctgagaagcaggagttagtggaggaaggaggagatccagtcccagatacaggcaaataagtcttttccctctcccaagcatggcagttagccctgcaggaaccaggataagaggaaaggtcatcatacctgccagtcttcctgaaatacagaaatgacatcacggctgctataatggattaaggccaggaagatgtcctgttcctgaaggagctgtcatggaaaaaaaagaaaagaaggaatgaagatgatgttattttacatgggggagcctcaggaacaagcatgtaacatgaggtactctataattgtttcttcaaggactacgttatttctgttggaaaattgataggagatgattatattcttgcagtttttttttccctctcaccctgtttctcagttggtgatcagtcctctgtcaattctctactgtgctcagatatttggaaggctttcagatgtgagaaaggctgattgctattttctatgtcattagaacttgccacctttgcaccttttcatggttgcatctttttctcagtgtctctgttgtggcagtcatgaatgagaccctgccaggtctccatggcagagacttgattgacagaaggcccaggtcagtgcatttcaaattcaccacctcctttgcacagaaagcttctttcctacaggctcccagcaagggcgtgaaagcaagtctagttctctgaggctctctttaactctaatgggtgactggttggaggattccccatcagccttgcaaaaactcttataattgaattggtacctaaaacttctttctctttctttttcacaggaatcagctctgcatagtggtctgtgggttctcccgtactaccttcatgcctgccccacattccctcacaggtgtcttccctgataagttatcttgtatgtctaatcccatcttggatgcatctcagtcagtaaaaactaacataccaggcttgattctttgcacttagctttttttctttctctcccacaagtagtcagtaaccatgtcctagtgttttatgtgttacctctttttccatatatatatatatggaaaaaggaaggtactgttgaggggcacttcctatgtgccaggccctgtgctaaatactttccctgtatctcatttaatccacacaataaccctgtgaggtagacattatttccattttgccgatgaaaagacagaagcttagagtggtgtaaaactttcctggtgtcatatggctagtgacaggtggatctgagatttgattctaggactatttgacctctaggctaatgatgatggtagtcatatagcagctgacattggttccactgtgtgtggcatctcgttttattgactgcattaaacctttaaaagaaaggtatgaagaaagcactcttattgcagttttcaggtgaggtatcagaggttcagagaaattgagtcttgtgcaagaaatttataactgtaaactcttacattaaaaaagaagaaagatctcaggtcaacaacctactttaatacttcaggatatgaaagaagaacaaactaaacccaagcacagtgaatgagggaaaaataaggattagagtggatataaataaaatggagaatggaaaaagaatagaggaaattaatgaaaccaaaagttgattcttcaaaataaaatcaacaaaattgacaaccattaactagattgactaagaaaaaaagagaaaagtttaaaattcctaaaatcagaaatgaaaatggactctgagcatggtgggtcatgttttaatcctagcactttgggaagtcacagcagaaggatttcttgagaccaggtgtttggaccagcataggtaacctggggagaccctgtctctacaaaaaaataaaaaagccaattagctgcgcatggtgacatgcacctgtagtcctagcatcttgggaggctgaagaaggagaattacttgagcccaggaggttgaggctgcagtgagccataatcacaccactgtattccatcctgggctggcctacagagtgagagcctgtctctctctcttcaacaacaacaaccaaaaaaaaaaaaaaaaaaagaaaaaagaaaaatgaagcgattactaccaattctaataaactaatgattatgaaagtactataaataattgtatgccaataaattggataacctagatgaagtagacaaacccctagaaacacacaaaaatatgaatggaactataatcagtaataagattgaatcaataaaacatttgatgaaattcaatattttttcataataaaaactttctaagaagggaaggaaaccacctcaacgtaaaggcaatatgtgaaaaacccaatgctaacatcatactcaacggagaaagactgaaagctttccctgtatgagcaggaacaagacaagggtgcctgcttttgacacttttattcaacatagtattgaaaggtctagtcagaaaaattaggcaagaatttaaaaaaagacgttaaaattggaaggaaggagtaaaattatttctgtttacagataacttgaacttatatgtagaaaatcctaaagatggaacaaacctattagaattaataaataaattcagtaatgttgcacaatacaaaatcaacattcaaacatcagttgtatttcaatacactaaccatgaacaatctgaagggaaattaagaaaaaaaatttcaatttatattaacatcaaaaagaataaaatatttaggaatgagtttaaccaaagaggtaaaatgattatacctgaaatctacaaaatatggctgaaagaaatgaaagatgacatcaataaattgaaagacattttgttttcatgaattggaagactcaatattgttaggaggacagtgctacctgacgtgagctgcagattcaataaaattcctatcagaatctcagtgacatttttgcagtaaaaaaaaatctgtcctaaaatttatattgcatctcatgactctaaatagacacacagctttgaagaggaagaatgaagctggaggactcacacttcctgatttcagcatttactacaaagccccagtaatcaatacactgtggtactggcataaaggaggacatagaaattaatgaaatataataacccagaaagaaatgcttgcatatatggccaaatgattttcatcgagtgtgccaagatcgttcaatggggaagggaccgttttctcaccaaatgatattgggaaaggtggatatccaagggcaagaacagtggaacctttacctaacaccatgtacaaaaagtaacccacaatagatcaaagatctaaatgtaagggcaaaaactattcaactcttagaagaaaagcttcatgatactggatttcacaatgatttcctggttgtaacaacaaaagcataggcaacaaataaaatggataaatcggacttcataaaaatcaaaaccttttatatatcaaagaacactatcaagaaagtaaaaagcaacccacgaaatgataaaaatatttgcaaattatatgtgtgataagaaattaatttccagaatacatgaaaagctacaagtcaacaacagcaaacatccaaaaacccaattaaaaaatgaacaaaggattaaaatggagttttctccaaggaagatatacaaatatcaaataagcccatgcaaagttcctcagcatcaggaatacttggagatatgcaaatcaaaaccacattgttacaccacctcacacactttaggatggttttgataaacaacaacaatgacagcaacacaaaacaacaggtgttttcaagtagatggaaaaattggagctctagtgcattgctgatgggaatgggaaatgttatagccactgtaagaagtggtgtggctctctctcaaaaaattaaacaataaattaccatttgatccagcaattccacttctggacataatccccatagaattgaaagaaatttgaacaaatatttgtaaactgatgttcagagaagcattactcacactagccaaaaaatggaaacaactgaaaagtccattgaaagataagtgggtaggcaaatgaggtgtatctatacattgaaatgttgttcaaccttaacaaggaataaaattccaatacatagtgcaaagtggatgaaccttgaagatattatgctaactgaaataagccagacacaaaaggataattattatataattccatttataaaagatagttagaatagccagttacatagagacagaaagtagaatggtgggtgctaaggtttagggggagaaggagtgagagttactgtttattggctacagaggtttaatatggtaagaggaaaaagttctggaaatggatagtgtgatggttacacaacactaaattgcacacttagaaatagttaatggtaagtcttatattagatatatataaagtgtccagtagtcttaccctctctataattacacactttttggcactgcccctttcctgccatgcagagccctaggggtgaatctccctatttctccagctctgcatcagtcactgtcctccgtgctgtgtcccaggtgctgtgcccacagcctcatacagccggtgacttcagagccaggacacagctcaggagtctgccctgaggctccctctctttttgtttccctgcagcctggcccgggggaggcttggcttcaactggcaactcgatttagccaaattcaggacaggccaccagggctctttctccacagatgctggtcccacccaggtggagtcaggcagggccagtcaccagaggagcctggagcagagcaggaagcagagtctgagctgctcctccctcacccaaggggcttcctcctctcatctgggggaaaagtgtcagcttgtttcaaagcctcggatgttccttgtagctcatagaataggtacaagaaaacaaagacgtggcagaaggggatgtgttggtgacagcaagaagcaacttgatcttgaggactctccttcttgtccctctctgaatcctcttctaccacatagggctcagggctgataaagcccgctccgtacctttctcaggccagacacaaggtcagccatgagaaaacagaaaaacaaggagaagagagtctgtagagacaaattgggagggttcaggaggagaatttgggatttgcttgtgcccatgggacacaggctgggaataaaaatgttttcctgactcttctctgaaagccagagagactccacctaaaactctattgccaagcatgctgggatccacttaccagagactttgactgtcatggatttggagctttccatgccagtggctgagttacgaacagagcaagcatagagcccgctatgctttgtagtaatctgggggataaagagcttttgtcctgatagctgaaacttcccattaattgtccaagaatattctgctggtgggttagagtccgcgaagcaggacaagtagaggttttctcctgaatggtaataggtgaatgaagggtaaattctggggaggtctggaccatctggagcaaagagaataaagccacaggtgatgtcatccgagggaaggggatgctcctggtctcttaaagggacacagtgaccctctgagccaagacacaccctcaagtgccagccaaaccccctctatgttcactgagctgaagcctgaggtattcccctgtttctcccatcacaagctgtgggccccaagtctcccatgacaagagcgtcccctccccttatattcttggttaaggctgtgcctacccagatcttcccagggcaggaagttatggccagctcggatgtccagaagtaatggtatctatacttggaccagagagagagtgagaggcctggcctctggtcgttttgatttaagctggtgtcctggcccacagaggaacaaaagatactcacagaggacattcagggtgactgggtaactgcggatgccaccatatcggtcctgtatttcacattgatagggtcctgtttcatttctcgtgacactgggtagaatgaggatcctgttttcaatgggtcgctttaccctgggactgaccgggaggctctgaccatttagccaccaaatgtaggtgtagttctcactcttaggttcacaggtgaaggctaagacatccttattctccctggggtttaagttgttgatggtgatgtagggcttgggcagcttcgctgtgtggataacagagagaagattgtcctgtgtggcacctttgattcctccactggcatccttcaatcagagttggcatctcccacctctcagcccacccgagtccttgaaagccaatagctggtgcgtgtgtcacaagacagatgcatgatgatctaagggctcaaagactgtgaggccagctgctctgtcttagggaagcacagactttctcaagtgtcaattgagcagcagtgttgggtcatggacagacacgtcaatgggagtcacagcccctggtacccctcccagtccctccataatcagttgactggctggctcaccctgggttccttacctggaatgtgcaactggtgggccccttccaaattccatcctactttgcccccatagatgtgatttctctgcaacttccatttccaaggacattctagagatgagtaataatgggacttcccatggccctgaaaccctgaagatactgagcagcctggcctgggactggatgtttcagcagaaataacacaggggagaccagaatcaagcctggaggtcagttcagtcatcaggcagtggaggctcaaggtggggcagttttttgcaggtgtttcatgatgacttacttgaaccagtgacctctaaagatagagcagagtgcaaggaatgatctagaaagagtgaaggtgacaggcaagagctggtggctttggagcagaagcatgttccctgtcttgggttctttaagtttcctctccttctgcagagggcaggtgaggaccatgtggatctttccagaaatacatgtggacatttgcaaatgcagcactgactggtggaaagggtgggaatgaactgctggaaatctggtcctcatggaccatatgtgtttgatggatatgagacaaatttggagagaagttttgcaaatattttctttcattggacattctactcaatgattccatgggttcgactactctagggacctcatgtaagtggattccagagtgaatatgagaagagactgctggttgccaggagctgggagtggggagaatcagaagttgttcatgggtgggcagtttcagttattcaaggtggggaggttctagagatctgctgtagagcttgatgcctatagttcacacagattgagtatttcttatgcataagacttaggacaaaaagtgttttggatttctgacattttttgattctgaaatatttgtcatatacttactggtttagcatcccaaatctgaaagactcaaaatctaaaatgcttcagtgagcatttcttttcagcatcagattagtaggcaaaagtgggaggtgataagccaaagatattcttgccctttttttttctctcaccacttttctagcttggtgattagttttcggtgaattccatactggccatgctgcacttgtatatttttgaaggccttgggatgtgagaaaggctgattgctattttctatgtcatcagaactttccaccttttcatggttgcctctttttctcagtgtatctgttgtggcagtcattaataagagcctgtcaggtgagatttaggacagtgttttctaattctgcaaaaaatgttactgggattctgttaggtgttacattgaatccgcaactcactttgggaatattatctttctaacaatattgattcctccaatccatgaaaatgaaatgtgtttccatatattgatatcgtctttaacttgtttcagcaatcttttgtagttttcagggtataatcatttgactttttggttaaacttatttcaaaatattttattccttttgatgttaatgtgaactgaaattctttccttaatttcctttcagattgttcattgttagtgtatagtctaaagaatgatctagaaagagtgaaggggacaggcaaaagctggtggttttggagcagaaacatattccctgtcctgggtttttgattttccctctccctttgcagagggcaggtggctcttccctgatagctagatagacttcactggaaaacatagtgccaatgctccagggatccacttaccagggactatgatcctcttgattatgagatttgttccagcagtggctgagttatggatgaaacagacatagacccctctatatgttttagtgatttgggggataaagaacacttgtgctgattgctggaacttcccatcaatcagccaagaatgctctgccagtgggtgagagtctgtgaggcaggagagcttgggggcttcccctgtatggtaataggtgtatgaggaggaaatggtgggggcatccaggccatgtggagcaaagagaataatgtcataggtggtattgtcagagggaagggaaaatcctggtctgtggaagggccacagtgaccctgtgagccaagttgcaacactgaagtcccagccaaatccctgctgtgttcactgatctggagcctgagacagtcacctgttttgcccatcacaagctgtggacgctgagtctcccatgacaggagcagcctcttttctcctattgttgatcaagcctaggcctactctggtttgcctggggcagaaagtcatggccaggtttgatgtccaggggtaaaggtctctgtacttggacctgagagggactgagaggcctggcctctggccacgtgtatttgggatggcagactggctcacagaggaacaggagatactcacggaggagattcagggtgactgggtcactgcggctggcactcactgggttccgtatttcacattcatagggtcctgcagtgtactttgtgacaccaaatagaaagagggtccttttgtttttggacaactgcaagctgtgagtcatagggaggctctgaccattcatccaccacaggtagcttgcgtccggagtctcaggatcacaggttaagctcacagcctccatgtcctccctggggtataagttgctgctggagatggagggcttgggagtctccactgtgcagaaaacagagagaagattgccctgtgtggcacctttgattcctccaaaggcatttttcaatcagagttggcatttcccacctctcagcccacccaagtccttaaaagcccatggcaggtgtgtgtgttacaagacagatgcatggcaatctgagggctcagagattgtgaggctgcctgcttcgtgtgggagaagcacagactttcttaactgtgaattgagcagcagcattgggtcacggaaagacacaggaccagcagtcacagcccctggtgcctctctgagtccctccatctcgaagtgcctgcctggcccaccttgtggtcctcacttggagcatgcagtgctggaatcttcttagtttcagtcttactttgccgcccgaggtatgttttctctgcagcttcccttgccaaggacatcctagagatgggtgatggaacttccaattgtctttaaaccctttggatactggaaagcctgacctgggactgggtacttcagcagaaataacacaggggagaacagagtcaagtccggagttcagttcagtcatcaggcagtggagccacaaggtggggcagttttcccaggtgtctcatagtggctgacttgagccagtgacctctaaagatagagcagagtccaaggaatgacctacaaagagtgaaggggacaggcaagagctgatagctttggaccaagaccacgttccctgttctgggtccatgatgctcccttccccctgtagagggcaggtgaggaccatgtggatctttttggaaatacatgtggatgtttgcaaatgcagaaccgactggtggaaagggcgaacatgaacagatgatggaagtctggccctcatggaccatatgtgtttggtggatattagaccaatatttgggaagaagccttgcagatactttctctcattagacattctactctctgattctgaatttgactactctatgtacctgatatcagtggattccagagtgaatcagagtgtagaatagtagtttccaggagctgggatcaggggaatagggcgttgttctgtgggtgtgcggtttcagttatgcaggatgaggaggttctagagatctcctgtacagcttcatgcctatagttcatacagataaagtgctccttattcagaaagcttaaaaccaagtgttttggatttctaattttttttattttggaatatttacagtacatgtactggtttagcatcccaaatctgaaaaatttaaaatccacaatgcgccagtgagcacttctttttagcatcacatcagtggtcagaagggttgagttttggagcatttcagattgtggatttctggatttccgatgctcaatttgtaatactgtaattttcccataaaaatttgtcaggagtttagaccttatgttctgactctagtaacaacaacagcaaaaaatttggaggaaacattgaaatgttttcataagtggaaatttttactgatgatccaaacatctaagatcaattgctggtagtagtatttctcttgagaccaaaataaggtttaggtgtgccgtgaattccagcaggatcacattatgctcaaagaaagatgccaaaggtgatttgaaattagcaactccttaagtagagagagtcccgttaaaaggacagaactggttagtgtgtcaattgcataaagggaggaaggatgccaaactaaaagaagtgatgtgtgttatgttagtaaatatagaaagaacctgcttctaatttctgtgcagagttaggaaaaatggggaggaccccaaaacaggtatgtgaaatgctttcttcattttctcttaagctcaggaaacaccactagtgtttaagtttgtgtgaattagaaagagtctaagtgagatgccaatggtttgtgtgtctccccacacgcagaactccaacttatgaaaacggcatcatcatgaggaaacagttgtatgtggcacaggcagtaaagccatcagatagcacccacctggccacctccacctggtccccaaaaccaccagtattcccattacgtgtatcttatagcctttgtagttgtcccacagctacaaaatttaaaaattgctattgtcaaatcaaaatattaaatatgaagttgaaatgttgttccactttttttccccactcttgttgaactttcctgtttcagttttggaagtttctattgacatatcctcaagctagggattctttcctcagctatgttcagtctaccagtaagtatcaaaagcattcttcatgtctctaaaaacatttttttttttctgagacagagtctcgctctgtcacctaggctggagtgcagtggcatgatctcatctcactgcaagctccacctcctgggttcatgccattctcctggcttggcctcccaaatagctgggactacaagcgcctgccaccacgtccagctaattttttgtatttttagtagagacggggtttcaccatgttagccaggatggtctccatctcctgaccttgtgcctgcctcggcctcccaaagtcctgggattataggcatgagccactgtgcccagccatctctgagggattttaatgagttgttgacttttgagtttgttcagctttttacttagtgttagaaccgaggaacaaatttcaagcttgttatatgcctgacaggaagccagaagtctctaggaagtgaccggagaatgtgagctttatagcaggttgaggatggagtcacaagtgaaatgggtgaaatgagcccatggggtttggggactgcaggcctgtccagcctctgacactctggtgagtcagtgctaagattacaacagtgacagcaaactagcatggctgagtccatctggtatctagtctcaggctggctgtcctcactcattcctgggcataggccaggctaaccttgggaggaatttagtttattgtttaactttgaagcaagaatgataattgttcctctgtaaaagtaacacccttactttgcccagggactgcctttgtaaaactagtgaaagaccatgagattaagattataggagggaactgaattctgctaaaatgttggcagagtttttataatccttgactgctcaaatgtcgttgggccagagtttacaaaatttgtaactaattgctcctatagataacatcactattgtagaacgtgagattggtcttttgagatgtttctcattcttttgcattctggcaaccggctgacctcatccatacctatgactaatggctcagcccgtcatgtggtccctacctagaggtggattcaagcacaaacagatcatttccctccgcccgcatgattccatcaccaatcagcagtactcattttttagtcctgtgcccctgaaactatccttgaaaatctctaagccctgatccactggggaggctgatttgagtaataataaacctccatcctcctgtttggcagacttggagtcattaaaatctttctttactacaaaccaccatttcaatacatttgtgtgtgtgtgtgtgtgtgtgtgtgtgtgtgtgtgtgtgtgtgtgtgcaggaggccagaagaacttgtctggcaattataagagtggatggagaaactgcctatccctgtcccatggtcttgtccacaggtcagcctcacaaagggaaagagccctggatgggaatacagtggaaactcattctcttagtgacctggggacattggctctagaggaagcctggcaggagtggcaactccaggtgatttctgcacctttcctatttcctgggaggtgggccaggccacagtgttagcgggaagggaactgaacagtcagcctagttagagggagtgtctggggaagacctaggggtgggggaagaagctgtgcaggacagggcttgccagtcagaatgaagtgggaggaagatgagggacacagagaagcagagagaggcagagacaccatggcagtgagcagtgagggctacactgacttcagagaccccagggaccaggtgcccccagttccacagtccaggaccaaggagccctgagaaccctccggtggccaaagagcttcagagttacatgaggtggggttgctttagggtcaagaggtagtggggggatgaaacgtgggtgtcagcctctgaaggacaagggacaggtgtggctagaacctcctaggattctgcatgcaaattcagtctctaaagaggttttggatcattcatttcttcattccatttcttcatttgttatgtaagagctcctgagtgtgtctgtctcgctgggcctatggtggtgtagggtgtgagtggggaaagaaaacaaggtcctctccttgatcctcttgtgacagtgacatggacactttgggaaacacaggatttcaggttcagtgatggtggttaagatctgagggggaggcctggacatgttttttccactgactctgacggttgaggtaggtgatttagttctggaatacagactaatcagttgaccgtttgctctcactcctctgaggtttggatgcctaagaagagaggatttgagccaataaatgactatagggtgattggaacccagtaagccctcacttctggtggaggagagggtgggcctttggctccagacacacctcatgtgaccctgatctcccctttgtgtttgtgtgactctggttcagtgactgtggcttcctgtgcctcagttttctctcaaacaaataagctaaatggcaaatggactgtggcttttcatgctatctgtgaataaatgttaaatgattcacagtcacgtgacctaattcttggcacagtggaggtttcacacaaacagcatttattattaatttgcttccatgagaaagcacctttatgtcagatgcctgtggacaagctgctacctggtatatcttctctcctctgtttctgcttctggggacattagactttctatggactggcctaagcctcctaaggcagttgtctgatggcctacaaagcttgtctttctgtcctctccactctgagtgtcaggtgaagaaagctctgtccttgcccagatgaggctctgagggctgagccctggctggtgaacagctccaggagacacagtcctctgacagctggtaaatccttggtcccagtaagccctgcccaagaagcgacaacccagccccagtacaggctcctcagatttatctggagcaaggatttagggacatggttctgggggtgaggcttctagggctgagcttctctgagagtatttcatggggcccctgaggccaagccctactcagtttgccagggtctttctcagggtcaaatttatgaagagagcatgaggtgcttggctgagactgatctcctcctgctgagtccccccatcagactgtccttcctctgcagcgagtgtctgcagggtctggatgcgggaaaggaattctgatctgttgaaatttgtctcttctgtgtgtgtcctgcactaaatgcccaaaccccagcatgggacataatgcagagagggacacaggcacaatccaggcctgacaatcctttgtgtgtgaagtaaagaccccatcccccaacacccagtgatcacgtggagtcactcacggtataaggtgaaggtgaaatgtccagtttctcctctagtcccatcacctcgctttacgatgtgtaaggtgtaggatcctgcgtcctcccgggtgacattctggatcagcagggatgcattggaatatactgtttctcgtccactgtatgcaggcccatatataattatttgaccatctactacgtatgatgtaatgtaatggtagaggtccttcatttgccctttgtaccagatgtagccagcaagattctggggcaaattgtggacaagtagaagaacgtccttccccttggaaactttggttggctcggcttcaatcgtgacttgggcagtggtaggcaagttccagaagtttaaaagtaatgctaggaggtggagagagcatcagtcaatattgagacctatgcattggggtgaaaagatgtggccctgggtcctgagaaggtctcttcaatcctcagctttgaagagacacacacacacacatacaaacacacacacacacacaaaaggggcatgtgtatatgtgtttgtgtcctactctcctactaggtgaaggtcagcaacatgacccccattccttcaacacttctgaccttggcatttttctgtttggaatcctcttccccaggggtccgcacggccccctccacactgccctcaggtcctgctcacatcagggcatccttagacttctttcctgacgcctccttcagagaccctgggtcttccctttctgacctttccctgctctgctccctccagggttcttctcaacacctgacctcacattctagaactctttgcatgtctgtcttcccccccatgacagcgtgagctccgtgaggacagggacttttgtgatcttctttgcaccccagtgcctggaacaggctgcagactcctgtagatgtgagagttctcagggccctccatgccctgggtgttttttcttcccccagttgttgaggtttttttgctgaggacagtgtttcatgccctgcttatatttttatttgaagtgtcatctgatatagttattattatcatttttcaaaatgtggtggcccctgatgattaatcaggaaaacagaacacttaagattttcctacctcttaccaattctggttcctgtgactttcctgttttgacccctgtccctcttgggtgtattttcccctatccaggctccaacagagacttctttcctttttttcttttttctttccattcttttttttttttgagacggagtcttgtactgtcgcccaggctggcgtgcagtggcactatctcggctcactgcaatttcttcctcccgggttcacgtgattctcctgcctcagcctcccgggtagctaggattactggagcacaccacaatatctggttaaatttttgtatttttagtagagacagggcttcactgtgttggccagactgatcttgaactcctgatctcgtgatccaccctcctcagcctccctaagtgctggcttcttttattttttagaaccccaggagtctctccaggagaccccatccagtcactctgcttcctcctcctgtcctctcccaggaagttctctcctcacctgtgagcaggagccccttccaggtgatgcgctgtgtgcagggaggggctgagaggggccccatggtctctgctgcctgcgtgttctcctctgtggagctgagcctaggatccagaaacttcctgagcatggctctcagctgtgctgtccttcctccttctgcgctgagcctcttcccggggcaggagcacttctcaggttcatgggcggggtcaggcccaggacacctctctgtcccctcctctctcagtcctgcctccttgtccctcctgtttttccttttgtctgtgtttcaggtccctgggaattgtggaggcctctgcctttttcagcagtgattctttcaccaagcctcatcacacactttgtgcagacacacacacacacagacacacacagaagagacacacacagacccacacagtcagaaacataccctgcaggttgggcaagcagagtcctgggcctcagcctcctgctgtccccatggctctgggtcggggtgcacattcatgccctttggcctctttcatccccatctggctctccccttcagtgcaggaggctggagctgaaccaggtccctgtcacagtgacaccccattgtgctgtgggtgagctgtgtgttgcctgatgagagggaaccttcctttttctaatcgtgtctagcttggctgcagcttccaaggatggacattcaggacctgggtgtcccagaggaaactgtccttcctggaggtgtgcaggatgaatctctcatgcctcttgtgaggagaggcctgtgctggttgctcagtggggggctgtgagtcccatagtcaaagggacagttctcggtcactctatggctccctggggtctggcggctgagctggagctcatggtttctcatgttcttcctgaccatctttgatgtcctctcttctctgcccagcttattgtcctgtggtcaccacaccttccccgtggtggtgcaggaggaagtggggagttacccaggaaccccgggggacatggctcattgagatgcaggagggggagcctgggacagagcaggggttcagagctggagagattcatcccaacttactctgtggccatgatgggctcagccatccatgtgccgacatacccaggggtctgtcctgaggtttttgacctggccaagctgctgtgtgtagaggaggaacaggtagtggccagagagcctgtctggagggacgttgctcacacctgagtgggcgtgtgggggtgagttgtgttctgggagcaaagagcaataacatcccccttctcccagcaagcacacaggagaggtctgtcttcccaagggacagctgggggtaggtggccacatcccggatggtgcctgtgtgtgagcatcacacgtgctctgagccccccggggtgcagggagcaggcaggacacagggtgcctggctgattcccggggaggctgtgggccctcaggcagccactgttctgtgtcagtgctaggcttggcctgggatgccccagagaacaggacagatggagcaggggcaggcatttagggagcagtgacagaacgagttgatgaggatggagggaggccacgaggggaaagcacccagtgtagtgtcgcgtgcaccagcactgccctgggagatgcctttagctgggcccagggaaggagcaggtgtgtggggaggagctccctgcagggggagtggtgttaggttggcggcccccaggtcagggaggagctgacagagtccgtgtggggagcatggagggcgctgaggacttgggccgaagtgaccctggtgagggtggaccctgctgggctgtgggttccgttgagggcggttggcatcccctgggaaggctccaggctgggagggactctgtccccctctggtggacagggagggaaatgtgaacggcagcaatcccaggccaggctgcatgttttattccacatggatctgcacacttcacacgaggtcacacatatgttatgttatagctccttcaccttccagccccgtgagtcccagtctgtgtggctctatgttcactgttctccctctttcacaatcagatgtcccaaatgcagatttttgtcaccttctgtgagtttgtgtttgtgtgcagtaggcagcactgtgtataccctgggggcagtgatgtctggggctgagcagtgcacatgggcttgggagaagaagagggagcagcagggtgggaagatcaatgtcaggggggcaaggacaagtcattttcattttctcactcccagggaccagaacccaggattctgactccagggcacagtaccacaccctgctggtgtccctggatgtcatgatgctcatagtgtcatgttgccttgtcattcatcttttatggtgtaagtttatttgcctcaaatcagaggcagggcttggtcaccaatgcagtttcaatactgtatctggttcaggtggctccagttggtgtgcagagataaaatcttagaggcatctctcctgcttggtgtgctgggtttccctctctccagctgctttctttaaactgataattctgacatttgccctcacatttaaagtgaccacctctcagtcacagcgtgagcccctggtcccagtgtttgctgcttgctttgaacacatccattaaagctccctgctggaaacctgtcagataacaccctggacttaataaagccattggcttaccggtctcttctctcctctctccatgggctcactgacctctgtgtctgtggtctccaggtgtgccaagtgctccccagtgtctgtaagtagtaaaaatacttacactttcacgttgtggttgtatcactgtggcctcacatgccatccagggtctgatattgaggctgccttatgggacctgtgctggttgagcccctgctggagctcttgttttggggcgtctggttctgctggggacaggagcttccagctaacttgattgaaaatctgatgcctttcattgaaacactgggtcagatgatgtattcatgggcttcagctgccataacagacaccttagcctgggtgaattaaataatagaaatctatttttcacagttctgtgaataatgtgctattttaaccactttaaaatgcataatcaagtgaaattaaccacttacacagtgttaaattaccatcaccagtatttttcctagaaaatttttatcattttaaactgaaactttgtatcttttaaacaataactccctgtatgttccaccttagaccttgatcttctctactctgtctctatgaatttgcctattcttgatgcttcatataaatggaattatacaattatgttattttgtttctgacatatttcacttagcataatgtttccaaagtccatgcatgttccagcgggtgtcagagcttccttcctctttatggcagattatcattctgttgtatgtgtcaccatatttgtttattcatgtgttgatgaacacttggattgttttcatattttatcttttgtgaataatgctgcaatgaacattcccatgcaagtacctgtttgagtccctggatttaattctttgggtatatacctaggaatagatgttgtttcaaatgagaattctatgattagcttttttttattattatactttaagttttagggtacatgtgcacaatgtgcaggtttgttacatatgtatgcatgtgccatgctgttgtgctgcacccattaactcgtcatttagcattaggtatatctcctaaagctatccctcccccctccccccaccacacaacagtccccagagtgtgatgttccccttcctgtgtccatgtgttctcattgttcaattcccacttgtgagtgagaatatgcggtgtttggttttttgttcttgcgatagtttatgagaatgatgatttccaatttcatccatgtccctacaaaggacatgaactcatcattttttatggctgcatagtattccatggtgtatatgtgccacattttcttaatccagtctatcattgtttgacattttggttggttccaagtctttgctattgtgaatagtgctgcaatatacatacgtgtgtatgtgtctttatagcagcgtgatttatagtcctttgggtatatacccagtaataggatggctgggtcaaatggtatttctagttccagaatcgccacattgacttccacaatggttgaactagtttacagtcccaccagcagtgtaaaagtcttcctatttctccacatcctctccagcacctgttgtttcctgcctttttaatgattgccattctaagtggtgtgagatggtatctcattgtggttttgatttgcatttctctgatggccagtgatggtgagcattttttcatgtgttttttggctgcataaatgtcttctgttgagaagtttctgttcatgtccttcacccactttttgatggggttgtttgtttttttcttgtaaatttgtttgagttcattgtagattttggatattaaccctttgtcagatgagtagatttcaaagatttctcccattttgtaggttgcctgttcactctgatggtagtttcttttgctgtgcagaagctctttagtttaattagatcccatttgtcaattttggcttttgttgccattgcttttggtgttttagacatgaagtccttgcgcatgcctatgtcctgaatggtaatgcctaggttttcttctagggtttttatggttttaggtctaacgtttaaggctttaatccatcttgaattaattttttagaaggtgtaaggaagggatccagtttcagctttctacatatggctagccagttttcccagcaccatttattaaatagggagtcctttccccattgcttgttttctcaagtttgtcaaagatcagatagttgtagatatgcagcagtatttctgagggctccgttctgttccattgatctatatttctgttttggtacctgtaccatgctgttttggttactgtagccttgtagtatagtttgaagtcaggtagcgtgatgcctgcagctttgttcttttggcttaagattgacttggcgatgtgggctctttcttggttctatatgaactttaaagtagatttttccaattttgtgaagaaagtcattggtagcttgatgggtatggcattgaatctgtaaattaccttgggtagtatggccattttcacaatattgattcttcctacccatgagcatggaatgttcttccatttctttgtatcctcttttatttcattgagcagtggtttgtagttcttgaagaggtccttcacatccctagtaagttggattcctaggtattttattctgtttgaagcaattgtgaatgggagttcactgatgatttggctctctgtttgtctgttgttggtgtataagaatgcttgtggtttttgtagattgattttgtatgctgagactttgctgaagttgcttatcagcttaaggagattttgggctgagacaatttggttttctagatatacaatcatgtcatctgcaaacagggacaatttgacttcctcttttcctaattgaataccctttattttcttctccggcctaattgccatggccagaacttccaacactatgttgaataggagtggtgagagagggcatccctgtcttgtgctagttttcaaagggaatgcttccagtttttgcccattcagtatgatattggctgtgggtttgtcatagatagctcttattattttgagatatgtcccatcaatacctaatttatggagagtttttagcatgaagcattgttgaattttgtcaaaggccttttctgcatctattgagataatcatgtggttcttgtctttggttctgtttatatgctggattacatttattgatttgcatatattgaaccagccttgtatcccagggatgaagcacacttgatcatggtggataagctttttgatgtgctgctggatttggtttgccagtattttattgaggatttttgcatcaatgttgatcaaggatattggtctaaaattctcttttttggttgtgtctctgcccggctttggtatcaggatgatgctggcctcatgaaatgagttagggaggattccctctttttctattgattggaatagttcagaaggaatggtaccagttcctgcttgtacgtgtggtaaaattcggctgtgaatccatctggtcctggactctttttgtttggtaagcgattgattattgccacaatttcagatcctgttattggtctattcagagattcaacttcttcctggttcagtcttcggagggtgtatgtgtcgaggaatttatccatttcttctagattttctagtttatttgcgtagatgtgcttgtagtattctctgatggtagtctttatttctatggaatcgctggtgataacccctttatcatttttttattacatctatttgattcttctctcttttcttctttattagtcttgctaggagtctatcaattttgttgatcctttcaaaaaaccagctcctggattcattaattttttgaagggttttttgtgtctctatttccttcagttctgctctgattttagttatttcttgccttctgctagcttttgaatgtgtttgctcttgcttttctagttcttttaattgtgaagttagggtgtcaattttggatctttcctgctttctcttgtgggcatttcgtgctataaatttccctctacacactgctttgaatgtgtcccagagattccggtatattgtgtctttgttctcgctggtttcaaggaacatctttatttctgccttcatttcattatgtacccagtagtcattcaggagcaggttgttcagtttccatgtagttgagcagtttaaagtgagtttcttaatcctgagttctagtttgattgcactgtggtctgagagatagtttgttataatttctgttcttttacatttgctgaggagagctttacttccaagtatgtggccaattttggaataggtgtggtgtggtgctgaaaaaaatgtatattctgttgatttgaggtagagagttctgtagatgtctattaggtccgcttggtgcggagctgagttcaattcctgggtatcctttttaactttctgcctcattgatctgtctaatgttgacagtggggtgttaaaacctcccattattattgtgtgggagtccaagtctccttgtaggtcactcaggacttgctttatgaatctgggcgctcctgtattcggtgcatatatgtttaggatagttagcccttcctgttgaattgatccctttaccattatgtaatggctgtctttgtctgttttcatctttgttggtttaaagtctgttttatcagagactaggattgcaacccctgccttttttgttttccatttgcttggtagatcttccgctatccttttattttgagcctatgtgtgtctctgcacgtgagatgggtttcctgaatatatcacagtgatgggtcttgactctttatccaatttgccagtccgtgtcttttaattggagcatttagtctatttacatttaaagttaatattgttatgtgtgaatttgatcctgtcattatgatgttagctggttcttttgctggttagttgatgcagtttcttcctagtctcgatggtctttacaatttggcatgatgttgcagtggctggtacaggttattcctttccatgtttagtgcttccttcaggaggtcttttagggcaggcctggtggtgacaaaatctctcagcatttgcttgtctgtaaagtattttatttctccttcacttatgaagcttagttgggctggatatgaaattctgggttgaaaattcttctctttaagaaagttgaatattggcccccactctcttctggcttgtagagtttctgccgagagatccgctgttagtctgatgggcttccctttgtgggtaacccaagctttctctctggctgcccttaagattttttccttcatttcaactttggtgaatctgacaattatgtgtcttggagttgctcttctcgaggagtatctttgtggcgttctctgtatttcctgaatctgaatgttggcctgccttgctagattggggaagttctcctggataatatcctgcagagtgttttccaacttggttccattctccccgtcactttcaggtacaccaatcagacgtagatttggtcttttcacatagtcccatatttcttggaggctttgctcatttctttttattcttttttctctaaacttcccttctcacttcatttcattcatttcatcttccatcactgataccctttcttccagttgatcgcatcggctcctgaggcttctgcattcttcacatagttcttgagccttggttttcagctccatcagctcctttaagcacttctctgtattggttattctagttatatcttcgtctaaatttttttcaaagttttcaacttctttgcctttggtttgaatttcctcctgtagcttggagtagtttgaacgtctgaagccttcttctctcaactcatcaaagtaattctccatccagctttgttccattgctggtgaggaactgcgttcctttggaggaggagaggcactctgctttttagagttccatttttctgttctgttttttccccatctttgaggttttatctagttttggtaattggtgatggtgatgtacagatgggtttttggtgtggatgtgctttctatttgttagttctccttctaagagacaggaccctcagctgcaggtctgttggagtttgctagaggtccactccagaccgtgtttgtctgggtaccagcagctgtgtctgcagaacagcggattttcgtgaaccacaagtgctgctgtttgatcgttcctctggaagttttgtctcagaggagtacccggccgtgtgaggtgtcagtctgcccctagtggggggtgcctcccagttaggctgctcgggagtcaggggtcagggacacacttgaggaggcagtctgaccgttttcagatctccagctgcatgctgggagaaccactgctctcttcaaagctgtcagacagggacatttaagtctgcagaggttactgctgtctttttgtttgtctgtgccctgcccccagaggtggagcctacagaggcaggcaggcctccttgagctgtggtgggttccacccagttcgagattcccggctgctttgtttacctaagcaagcctgggcaatggtgggcgctcctcccccagctgcgctgctgccttgcagtttgatctcagactgctgtgctggcaatcagtgagactccatgggcataaggccctctgagccatgtgcgggatataatctcctggtgtgctatttttccagcccatcggaaaagcgcagtattagagtgggaatgacccaattttccaggtgctgtctgtcacgctgggagctgtagactggagctgttcctattcggccatcttggctccaggaccctataattagctttttgaggaacagcaaaactgtttctcctagtggctgtacctttttatattctcaccagcaatgtatgaggattccaaattctacataatgctgccacttgttattttacaatttaaaagaatggtagccagttttgtaggtgtgatgtggtgtctcattgcagctttgactttgtattttcctaatgactaatgatgttgagtatcttttcatgtccttcttgactatttgtatatcttctttgaagaaatgtctatttgagtcttttgtccatttataaattggatggtttctcactttgttattgagttgtagctagttcttgatattatctggacatgaaaactgcctatatgtggtttgcaaatattttctctcattccttgtctattaattattttcttgatattttcctttgatgcacaaaatgctcacatctttataaagcccaatttatcttttttttgtttcttatgcttttgtgtcatatctaagaatccattgcacatttgaggtcattaatatttacctctatgtctattttaagatgtttttatggttataggtcttatatttaactcactgatcaattttttagagaattgtttgatatggtgggaggtagagttatctaaattcactgttttgcatgtggttatctagttgtttctgcactatcattagaaaggagaattgttcctccattaaattgtcttgacaccctcttcaaagagtaattgaccataagtgtgagggtttatttctaggctctcaattctatcccatttgtctttatgtccattcttttgccagcagcttatgtctattctttggcagcaacttctgttttaataattgtactgctttgtgagatttcaaataagaaaattcaagtcctacaatttattttggcaagattgttttggctattcaggggtccttttttgaaaggtggggaggccaatgtttcacaattgggaaagccatttctgtcttcttcatggggaaatttgggagaatcttttaagaaacttaatctaagtaggtaaactgtcaccactttatttgctgaagtgctgtgttaaagtgtgcattgactcttgtggaagaattgtgactctggaagcacttgcccacatggtgagagacagtgaattccatgatgaggggcagagatgatgttgttttgggatacaatgttgttgggggagttgtatacatctctacttctttatgtctctgtacagtgggtgtagggaccagccacacagggtcggtgggtttttctctccatatgcagagatgagagattgtagaaataaagacacaagacgaagggataaaagaaaagacagctgggcccgggggactactaccaccaagacgcagagaccagtagtggcaccgaatgccaggctgcactgatttttattggatacaagataaagtgtcaggataaggagtgtgagccatctccaatgataggtaaggccacaggggtcacatgtccactggacagggggcccttccctgcctgtcagctgaggcagagagagagaggagaaagagagagagagcttacagcattatttctgcttattagagacttttagtactttcactaatttgctactgctaactaaacagcagagccaggtgaacagtatggaacatgaaggcagactaggagtgtgaccactgaagcacagcatcatagggagacggtcaggcctccagataactgcgggtggacctgactaatgtcaggccctccacaagaggtggaggagtagagtcctctctaaactcccacggggaaagggagactctaagtagctttcccagtctgctaagtagctggtgtttttccttgacactgaggctactgctagaccagggcccgcttggcaatgggcatcttcccagacgctgtcgttaccgctagaccaagaagccctctagttgccctgtctgggcataacagaaggctcgccctcttgtcttctggtcacttctcactatgtctcctcagctcctatctctgtatggcctggcttttcctaggttatgattatagaaatgaggattattttaatactggaataaagagtaattgctaccaagtagtgattaataatattcatatataatcgtatctaagatctatatctggtataactattcttcttttatatcttattatactggaacagctcatgccctcggtctcttgcctcggcacctgggtgacttgctgcccacaagtgggcatctccattggacacagtaggttttgaaatccttgtttatcctctggggtctgggtcttggcttacctgttagctgcagctgaaagaggtgtctgctaaggcaatgccacctgtggtgagaagaagggttcagcagagtgaaagcagctggggctcagagaaaccaggaaagtctgactcttagaaactgtgggtcagcagatgggtgtcctcaggggtaaatggaccatgccagtagccactgcagtggactggaagaaggtaagggatgccagttatcgcatgttctctctcagctctgcagctgaagatttgggccctgggttggtaaggccctgcagcaggggaagggtatacaggaatagctgcatatcaggaccaagtccatgtcatcttcttaggcattgttactgcagatggaggattcttttcagagacctggcctggacacatgggagggcccaccccattcttttgaaattattttaagagaacagtattagcaaatgtggtacatgttttattctgctagaatcagtattactgtcacattttacaatgtatctcttaggaaatggcgagagccatccacagaatgtgcatttaaaggggactctattataatttcagctttcctacctcttcatagaaaccatcttatctgcaaacacacgggcaatatctctgtgttcatttctattgggagtcctgtatgcaaggtggagagagccacatttccccctgagatgttatgtaaaagtttgggttgagatgacatatctgacactctattgttaccctcagaagctactacatgtgaaattctaatgactgcattatcctgccaagtgaaagaggcaggcatgagcaaggacagttaagaggggtgagagcctcatcatgatggggagtcttgttctgacatcttgggaaaaactgtccacagtgtgaagtcatccacttgttgtcctggtttacagtttgagcatctgttgttatggtgtcgaacattttagtgagttctgagtggctcacccttcaggtacaagggttttcccatgaaatttacattgagttgtccacctccagcttatagggcttctggaacagagtgggtctttttcttagcgattccatggaagaaaatggaattggaggaactagtagaattcagggtaatgtccagtctacaggtggataataaaaacacagaaacaatgaacagagatgcaatctcataacaggtgtactacagtttttattttccacataatttttctctctatgggcatctctagttttaccaatgataatttcagtagaataagtttgtttgcaaaataggttgagtttcttcaaacgtggtctgattgtttacataagtgcagcaagagtagcaatggaccgtgtaggctctcttttaaaattttcttttctctaagtttttataaggaatctgagattaaacttttacaaaactcttgagaataggaagccaaaccaaggctgacttcagactttgcctgcagttcatactggttcattctatctatatccttaaatataacatcccagtcaaagccttggtaatataaccaatgatttgaaatgtgtcctgttacaaagagagcagattgttgctgtacttgtgcaaatatgtgtattaccataaacatatcaattctcatgaatagttgcccaattctggggcagtcaggtagaaagcaaaagtaaatatttcaattacagttcaataaactgcggtatagtttattgaactgctataagctacagataggttaaaagagaaaaattccgtcaatgtagaaaacaaaccatttaaagaatcagcaaattttcaaatgaaaatcataaaaacattatcctcattattatcaattatttcattgaaatcaatgtttttcctgcttggtctaggctgggaattttatgaagatatcagcctgtttgttaaagttttcaaagttcttagacaaatttggagggtttaggaggagaatttgggatttgcttgtgcccatgggacgcaggctgggaataaaaatgttttcctgactcttccctgaaggccagatagactccacctaaatccctattgccaaggatactgggatccgcttaccagagacttttactgtcatggatttggagctttccttgccagtggctgagttacgaacagagcaagcatagagcccgctatgctttgtagtaatttgggggataaagagcttttgtcctgatagctgaaacttcccattaattgtccaagaatactgtgccggtgggttagagtccgcagaacaggacaagtagaggacttctcctgaacggtaataggtgaatgaagggtaaattctggggaggtctggaccatctggagcaaagagaataaagccacaggtgatgtcatctgagggaaggggatgttcctggtctcttaaagggacacagtgaccctctgagccaagacacaccctcaagtcccagcccaaccccctctatgttcactgagccgaatcctcaggtattcacctgtttctcccatcacaagctgtgggccccaagtctcccatgacaagagcgtccactccccttatactcttggttaaggctgtgcctacccaggttttcccagggcagggagtcatggccagctcggatgtccagaagtgaaggtgtctatacttggaccagagagagagtgagaggcctggcctctggtcgttttgatttaagctggtgtcctggcccacagaggaacaaaagatactcacagaggacattcagggtgactgggtaactgcggatgccaccatattggtcccttatttcacattgatagggtcctgtttcatttctcgtgacactgggtagaatgaggatcctgttttcaatgggtcgctttaccctgggactgaccgggaggctctgaccatttagccaccaaatgtaggtgtagttctcactcttaggttcacaggtgaagtttaagacatccttattctccctgggttttaagttgttgatggtgatgtagggcttgggcagcttcgctgtgtggataacagagagaagattgtcctgtgtggcacctttgattcctccacaggcatccttcaatcagagttggcatctcccacttctcagcccacccgagtccttgaaagccaatagctggtgcgtgtgtcacaagacagatgcatgatgatctaagggctcaaagactatgaggccagctgctctgtcttagggaagcacagactttctcaagtgtcaattgagcagcagtgttgggtcatggacagacacgtcagtggaagtcacagcccctggtatccctcccagtccctccctaatcagttgactggctggctcaccctgggttccttacctggaatgtgcaactggtgggccccttccaaattccatcctacattgtccccctagatgtgatttctctgcagcttccatttccaaggacattctagagatgagtaatgatgggactacccatggtcctgaaaccctgaagatactgagcagcctggcctgggactggatgtttcagcagaaataacacaggggagaccagaatcaagcctggaggtcagttcagtcatcaggcagtggaggctcaaggtggggcagttttttgcaggtgtttcatgatgacttacttgaaccagtgacctctaaagatagagcagagtgcaaggaatgatctagaaagagtgaaggcgacaggcaagagctggtggctttggagcagaactatgttgcctgtcctgcgttcaagtttcctctccttctgcagagggcaggtgaggaccatgtggatctttccagaaatatatgtggacatttgcaaatgcagcactgactggtagaaagggtgggaaggatctgctggaaatctggtcctcatggaccatgtgtgtttgatggatatgagacaaatttgaagagaagttttgggaatattttctttcactggacattctactctctgattccctggattcgactactctagggacctcatgtaagtggattccagagtgaatatgagaagagactgctggttgccaggagctgggagtggggagaatcagaagttgttcatgggtgtgcagtttcatttatgcaaggtggggaggttctagagatctgctgtagagcttgatgcctatagttcacacaaattgagtatttcttatgcataagacttaggacaaaaagtgttttggatttctgacattttttgattctgaaatatttgtcatatacttactggtttagcatcccaaatctgaaagattcaaaatctaaaatgctccagtgagcatttcttttcagcatcagattagtaggcaaaagtgggaggtgataagccaaagatattcttgccctttttttttctctcaccacttttctagcttggtgattagttttcggtgaattccatactggccatgcctcactcgtatatttttgaaggctttgggatgtgaagcctttgaaggctgattgctattttctatgtcatcagaactttccaccttttcatggttgcctctttttctcagtgtatctgttgtggcagtcattaataagagcctgtcaggtgagatttaggacagtgttttctaattctgcaaaaaatgttactgggattctgttaggtgttacattgaatccgcaactcactttgggaatattatctttctaacaatattgattcctccaatccatgaaaatgaaatgtgtttccatatattgatatcgtctttaacttgtttcagcaatcttttgtagttttcagggtataatcatttgactttttggttaaacttattccaaaatattttattccttttgatgttaatgtgaactgaaattctttccttaatttcctttcggattgttcattgttagtgtatagtctaaagaatgatctagaaagagtgaaggggacaggcaaaagctggtggttttggagcagaaacatattccctgtcctgggtttttgattttccctctccctttgcagagggcaggtggctcttccctgataactagatagacttcactggaaaacatagtgccaatgctccagggatccacttaccagggactatgatcctcttgattatgagatttgttccagcagtggctgagttatggatgaaacagacatagacccctctatatgttttagtgatttgggggataaagaacacttgtgctgattgctggaacttcccatcaatcagccaagaatgctctgccagtgggtgagagtctgtgaggcaggagagcttggggacttcccctgtatggtaataggtgtatgaggaggaaatggtgggggcatccaggccatgtggagcaaagagaataatgtcacaggcgatattttcagagggaagggaaaatctcgtctgtggaagcaccacaatcacagtgaccctgtgagccaagtcacaacattgaagtcccagccaaatcccagctgtgttcactgatctggagcctgagacattcacctgtttctcccatcacaagctgtggacgctgagtctcccatgacaggagcagcctcttttctcctattgttgatcaagcctaggcctactctggtttgcctggggcagaaagtcatggccaggtttgatgtccaggggtaaaggtctctgtacttggacctgagagggactgagaggcctggtctctggccacgtgtatttgggatggcagcctggctcacagaggaacagaaaatactcacggaggagattcagggtgaatgggtcactgcggctggcactcactgggttccgtatttcacattcatagggtcctgcagtgtactttgtgacacccaatagaaagagggtcctgttggtttcagacaactgcaacctgtgagacatagggaggctctgaccattcatccaccacaggtagcttgcgtccggagtctcaggatcacaggttaagctcacagcctccatggcctccctggggtttaatttgctgctggagatggagggcttgggagtctccactgtgcagaaaacagagagaagattgccctgtgtggcacctttgattcctccaaaggcatttttcaatcagagttggcatttcccacctctcagcccacccaagtccttaaaagcccatggcaggtgtgtgtgttgcaagacagatgcagggcaatctgagggctcagaggttgtgaggctgcctgcttcatgtagaaacacagactttctcaagtgtgaattgagcagcagcattgggtcatggaaagacacaggaccagcagtcacagcccctgttgcctctctgagtccctccgtctccaactgcctgcctggcccaccttgtggtcctcacttggagcatgcagtgctggaatcttcttagtttcagtcttactttgccgcccaaggtatgttttctctgcagcttcccttgccaaggacatcctagagatgggtgatggaacttccaattgtctttaaaccctttgggtactggaaagcctggcctgggactgggtacttcagcagaaataacacaggggagaacagagtcaagtccggaggtcagttcagtcatcaggcagtggagccacaaggtggcgcagttttcccaggtgtctcatagtggctgacttgagccagtgacctctaaagatagagcagagtccaaggaatgacctacagagagtgaaggggacaggcaagaactgatagctttggaccaagaccacgttccctgttctggatccatgatgctcccttccccctgtagagggcaggtgaggaccatgtggatctttttggaaatacatgtggatgtttgcaaatgcagaaccgactggtggaaagggcgaacatgaacagatgatggaagtctggccctcatggaccatatgtgtttggtggatattagaccaatatttgggaagaagccttgcagatactttctctcattagacattctactctctgattctgaatttgactactctatgtacctgatatcagtggattccagagtgaatcagagagtagaataggagtttctacgagctgggatcagggcaatagggcgttgttccatggttgtgcagtttcagttatgcaggatgaggaggttctagagatctcctgtacagcctcatgtctatagttcatacagataaagtgctccttatgcagaaggcttaaaacaaagtgttttggatttctaatttttttttgttttggaatatttgcagtacatgtactggtttagcatcccaaatctgaaaaatttaaaatgcacaatgcgccagtgagcacttctttttagcatcacatcagtggtcagaagtgttgagttttggagcatttcagattgtggatttctggatttgggatgctcaatttgtaatactgtaattttcccataaaaagttgtcaggagtttagacctcatgttatgttctgactctagtaacaaaaaatatttggaggaaacattaaaatgttttcatgagtggaaatttttactgatggtccaaacatctaagatcaattgctggtagtagtatttctcttgagaccaacataaggtttaggtgtgccatgaattccagcaggatcacattatgctcaaagaaagatgccaatggtgatttgaaattagcaactccttaagtagagagagtcccgttaaaaggaccgaactgggtagtgtgtcaattacataaagggaggaatgatgccaaattaaaagaagtgatgtgtgttatgttagtaaatatagaaagaactccctgcttctaaattctgtgcagagttaggaaaaatggggaggaccccaaaacaggtatgtgaaatgctttcttcattttctcttaagctcaggaaacaccactagagtttaagtttgtgtgaattaggaagagtctaagtgagatggcaatggctcatgtgtctccccacacgcagaactccaacttatgaaaatggcatcaacatgaggaaacagttgtatgtggcaaaggcagtaaaaccatcagatagcacccacctggccacctccaactggtccccaaaaccaccagtattcccattacatgtatgttacagcctttgtagttgtcccacagctacaaaatttaaaaattgctattgtcaaaacaaaatattaaatatgaagttgaaatgttgttccacttttttaccccactctttttgaactttcctgtttcagttttggaagtttctattgacgtatcctcaagctagggattctttcctcagctgtgtgcagtctaccagtaagcatcaaaagcattcttcatttctctaacagcattttttttttctgagacagagtctcactctgtcaccctggctggagtgcagtggcatgatctcatctcactgcaagctctgcctcctaggttcacgccattctcctgcctcagcctcccaagtagctgggactacaggggcccgccaccatggctggctaattttttgtatttttagtagagacgaggtttcaccatgttagccaggatggtctctatctcctgaccttgtgcccgcctcggcctccgaaagtgctggtattgtaggtgtgagccactgtgcccagccatctctgagggagtttaacgagttgttgacttttgagtttgttcagctttttacttagtgttagaaccgaatgacaaatttcaagcttgttatatgcctgacaggaagccagaagtctctaggaagtgaccagagaatgtgagctccatagcaggttgaggatggagtcatgggcgaaatgagcccatgggctttggggactgcaggcctgtccagcctctgacaccctggtgagtccgtgcaaagattacaacagtgacaggaaactagcatgcctgactccatctggcatctagtctcaggctggctgtcctcactcattgctgggcataggccaggctaaccttgggaggaatttagtttatggtttaaatttgaagcaagaatgataatagttcctccataaaactaacacccttactttgcccagggactgcctttgtaaaactagtgaaagaccatgagattaaggttataggagggaactgaattctgctaaaatgttggcacagtttctataatccctgactgctccgatgtcatttggcaagagtttacaaaagttgtaactaattgctcctatagataacatcactattgtagaacgtgagattggtcttttgagatgtttctcattcttttgcattctggcaaccggctgacctcatccatacctatgactaatggctcagccagtcatgtggtccctacctagagtcagatttaagggcaaacagatcatttccctccgcccacatgattccatcaccaaacaatcagcagtacttattttttagtcctgtgctcctgaaactacccttgaatatctctaacccctgatccactggggaggctgatttgagtaataataaacctctgtcctcctgtttggcagacttggagtcgttaaaatctttcttgactagaaaccaacatttcaataattttttttttttttttttttttttttttttttgtgcaggaggccagaagaacttgcctggcaattatgagtggatggaggaactgcctatccctgtcccattgtcttgtccacaggtcagcctcacaaagggaaagagccctggatgggaatacagtggaagctcattctcttagtgacctggggacattggctcgagatgaagcctggcaggagtggcaactccaggtgatttctgcacctttcctatttcctgggaggtgggccaggccacagtgttagtgggaagggaacagaacagccagcctagtcagagggagtgtctggggaaggcctaggggtgggggaagaagctgtgcaggacagggcttgccagtcagaatgaagtgggaggaagatgagggacacagagaagcagagagaggcagagacaccatggcagtgagcagtgagggagacactgacttcaaaaaccccagggaccaggtgcccccagctccacagtccaggaccaaagagccctgagaaccctccagtggccaaagagcttcagaattacatgagctggggtggctttaggggcaagaggtagtggggggatgaaacatgggtgtcagcctctgaaggacaagggacaggtgtggctagaaactcctaggattctgcatgcaaattcagtctctaaagaggttttggatcattcatttcattccattccttcatttgttatgtgagagctcctgagtgtgtgtctgtctcgctgggcctgtgctggtgtagggtgtgagtggggaaagaaaaggtcctctccttgatcctctcatgacagtgacatggacactttgggaaacacaggatttcaggttcagtgatgggggctaagatctgagggggaggcctggacatgttttttccactgactctgatggttgaggcaggtgatttagttctggagtacagactaatcagttgaccattttctctcactcctctgaggtttggatgcctaagaagagaggttttgagccaataaatgactatggggtgcttggaagccagtgagccctcacttctggtggaggagaggatgagcctgtggctgcggacacacctcatgtgaccctgatctcccctttgtgattgtgtgactctggctcagggactgtgtcttcctgtacctcagttttctgtcaatcagataagctaaatggcaaatggacagtggcttttcatgctatctgtgaataaatgttaaatgattcacagtcacctgacctaatgcttggcacagtggaggtttcacacaaatagcatttattattaatttgcttccatgagaaagcccctttgcgtcagatccctgtgggcaagctgctaccaggtacatcttctctcttgtgtttctgcttctggggacattagactttctatggactggcctaagcctcctaaggcagttgtctgatggcctacaaagcttgtctttctgtcctctccactctgagtgtcaggtgaagaaaactctgtccttgcccagatgaggctctgagggctgagccctggctggtgaacagctccaggagacacagtcctctgacagctggtaaatcctcggtcccagtaagccctgcccaagaagccacaacccagccccagcacaggctcctcagatttatctggagcaaggatttagggacactgttctgggggtgaggcttctagggctgagcttctctgagagtatctcaggggctcctcaggccaagccctactcagttctccagggtctttctcagggtcaaatttatgaagagggcatgaggtgcttgtctgagactgatctcctcctgctgagtccccccatcagactgtccttcctctgcagcgagtgtctgcagggtctggatgcgggaaaggaattctgatctgttgaaatttgtctcctctgtgtgtgtcctgcactaaatgcccaaaccccagcatgggacataatgcagagagggacacaggcaatgtccaggcctgacaatcctgtgtgtgtgaagtagaagtgacccctgtcccccaacacccagggatcatgtggaatcactcacgatataaggtgaaggtgaaatgtccagttactcctctattctcatcacctcccattatgatgtgtaaggtgtaggatcctgcgtcttcctgggtgacattctggatcagcagggatgcattggaatatattgtttctcgtccactgtatgcaggcccatatataattatttgaccgtctactacatatgatgtaatgtaatggtagaggtccctgatttgccctttgtaccagatgtagccagtaagattctggggcaaattgtggacaagtagaagaacatccttcccctcagaaactttggttggctgggcttcaatcgtgacttgggcagtcgtgggtgggttccagaagtttaaaagtgatgctaggaggtggagagagcatcagtcaatattgagagctatgtattggtgtgaaaacatggggccctgggtcctgagaagttctcttcagtcctcagccttgaagacacagacacacacacatacaaacacacgcacacacacacacaaaagcggcatgtgtgtctgtgtgtgtgtatgtgtgtgtgtcctactatcctactaggtcaaggtcagccccatgacccccattccttcaacacttctgaccttggcatttttctgtttgcaatcctcttccccaggggtccgcatggccccctccacactgccctcaggtcctgctcacatcagggcatccttagatttctttcctgacacctccttcagataccctgggtcttccctttctgacctttccctgctctgctccctccagggttcttctcaacacctgaccttacattctagatctctttgcatgtctgtcttcccctccatgacagcgtgagctccatgaggacagggatttttgtgatcttggttgcaccccagtgcccagaacaggctgcagactcctgtagatgtgagagttctcagggccctccacgcccttggtgtttttttttccccccaattgttgaggtttcttgctgaggacagtgtttcatgccctgtgtatatttttatgtgaagtgtcatctgatacagttattattatcatatttcaaaatgtggtggcccctgatgattaatcaggaaaacagaacacaagattttcctacctcttaccaattctggttcctgtgactttcctgttttgacccctgtccctctctggtgtatttccccctatccaggctccaatagagccttctttcctttttctcttttttctctttttttttttttgagatggagtctcatactgtctcccaggctggcgtgcgatggcactatctcagctagctgcaacttctgcctcctgggttcacgtgattcttctgcctcagcctcccgagtagctaggattagaggagcacaccacaatatctggttaaatttttgtatttttagtagagacagggcttcactgtgttggccagactgatcttgaactcctgatctcatgatccacctgcctcagcctcccaaagtgctggcttctttcattttttagtaccccatactctcaaggagaccccatccagtcactctgcttcctcctcctgtcctctcccaggaggttctctcctcacctgtgagcaggagccccttccaggtgatgcgctgtgtgcagggaggggctgagaggagccccatggtctctgctgtctgtgtgttctcctctgtggagatgagcctaggatccagaagcttcctgagcacagctctcagcagtgctgtcctgcctccttctgcgctgagcttcttcccggggcaggagcacctctcaggttcatgggcggggtcaggcccaggacacctctctgtcccctcctctctcagtcctgcctccttgtccctcctgtttttccttttgtctgtgtttcaggtccctgggaattgtggaggcctctgcctttttcagcagtgattctttcaccaaacctcaacacacactttgtgcagacacacacacacacacacacacacacacacacacacacacacacacacacacacacagaaggacacacacagacctacacagtcagaaacataccctgcaggttgggcaagcagagtcctgggcctcagcctcctgctgtccccatggctctgggtcggggtgcacattcatgccctttggcctctttcatccccatctggctctccccttcagtgcaggaggctggagctgcaccaggtccctgtcacagtgacaccccattgtgctgtgggtgagctgtgtgttgcctggtgagagggacccttcctttctctaatcgtgtctagcttggctgcagcttccaaggatggacactcaggacctgggtgtcccagaggaaactgtccttcctggaggtgtgcagggtgaatctctcatgtctcttgggaggagaggcctgtgctggttgctcagtgggggctgtgagtcccatagtcaaagggacagttctcggtcactctgtgactccgtggggtctggccactgagctggagctcagggtttctcatgttcttcctgaccatctttgatgtcctctcttctctgcccagctgattgtcctgtggtcaccacaccttccccgtggtggtgcaggaggaagtggggagtcacccaggaaccccaagggagatggctcgttgagacgcaagagggtgtgcctgggacagagcaggggttcagagctggagagattcatcttgacttactccgtggccatgatgggctcagccctccatgtgccgacatacccaggggtctgtcctgagggttttgacctggccaagctgctgtgtgtagaggaggaacaggcagtggccagagagcctgtctggagggaccttgctcacacctgagggggcgtgtgggggtgagttgtgttctgggagcaaagagcaataacatcccgcttctccctgcaagcgcacaggagaggtctgccttcccaagggacagctggggcaggtggccacatcccggatggtgcctgtgtgtgaccatcacacgcactctgagcaccccgtggtgcagcgggcaggcaggtcatagggtgcctggctgattcccggggaggctgtgggcccttaggcagctgctgttctgtgtcagtgctaggcttggcctgggatgccccagagaacaggatagatggggcaggggcgggcatttagggagcagtgacagaaagagttgatgaggatggagggaggccacgaggggaaagcgcctagtgtggcgtcgcgtgcaccagcgctgccctgggagatgcctttagctgggcccagggaaggagcaggtgtgtggggaggagctccctgcagagggagtggtgttaggttggcggccaccaggtcagggtggagctggcagagtccgtgtggggagcatggagggcgctgaggacttgggccgaagtgaccctggtgagggtggaccctgctgggctgtgggttccgctgagtgaggttggcatcccctgggaaggctccaggctgggagggactctgtccccctctggtggacagggagggaagtgtgaacggcagcaatcccaggccaggctgcatgttttattccacatggatctgcacacttcacacgaggtcacacatatgttatgttacagctccttcaccttccagccccgtgagtcccagtctgtgtggctctatgttcactgttctccctctttcacaatcagatgtcccaaacgcagatttttgtcaccttctgtgagtttgtgtttgtgtgcagtaggcggcactgtgtataccctgggggcagtgatgtctggggctgagcactgcaattgggcttggaagcagaagagggagcagcagggtgggaagatcaatgtcagggggcagggacaagtcattttcattttcttactcccagggaccagaaccctggattctgactccagggcacagtaccacaccctgctggtgtccctggatgtcatgatgctcatagtgtcatgttgtcttggcattcatttttataaggtgtaagtttatttgcctcaaatcagaggcagggcttggtcaccatggcagttttcaatactgtgtctggttcaagtggctccagttggtgtccagagataaaatcttagaggcatctctgctgcttggtgtgctgggtttccctctctccagctgctttctttaaactgataattctgacatttgccctcacatttaaagtgaccacctctcagtcacagcgtgagctcctggtcccagtgtttgctgcttgctttgaacacatccattaaagctccctgctggaaacctgtcagataacaccctggacttaataaagccattggctcaccggtctcttctctcctccctgtctgggctcactgacctctgtgtctgtggtctccaggtttgccgagtgcttcctagtgtctgtaagtagtaaaaatacttacattttcacgttgtggttgtattattgtagcctcacatgccatccagggcctgacattgaggctgccttatgggacctgtgctggttgagcccctgctggagctcttgttttggggcgtctggttctcctggggacaggagcttccagctaacttgattgaaaatctgatgcctttcattgaaacactgggtcagatgatgtattcatgggcttcggctgccataacaaacaccttagcctgggtgaattaaataatagaaatctatttttcacagttctgtgaataatgtgctattgtaaccactttaaaatgctgaatcaaatgaaattaaccacatacacagtgttaaattaccatcaccactatttttcctagaaaatttttatcattttaaactgaaactttgtatcttttaaacaataactccctgtatgttccaccctagaccttgatcttctctactctgtctctatgaatttgcctgttcttgatgtttcatataaatggaattatacaattatgttattttgtttctgacatatttcacttagcataatgtttccaaagtccatgcatgttccagcgggtgtcagagcttcattcctctgtatggcagattaacattctgttgtatgtgtcaccatatttatttatttatgtgttgatgagcacttgaattattttcatttttttcttttttctttttctgtttaatagtgttttttttatcattattattcttatactttaagttttagagtacatgtgcacaatgtgcaggttagttacatatgtatacatgtgccatgctggtgcgctgcacccactaactcatcatctagcattaggtatatctctcaatgctacccctcccccctgcccccaccccacaactgtccccagagtgtgatgttccccttcctgtgtccatgtgttctcattgttcaattcccacttgtgagtgagaatatgcggtgtttggttttttgttcttgcgatagtttactgagaatgatgatttccaatttcatccatgtccctacaaaggacatgaactcatcattttttatggcttcatagtattccatggtgtatgtgccacattttcttaatccattctatcattgttggacatttgggttggttccaagtctttgctattgtgaatagtgctgcagtatacatacgtgtgtatgtgtctttatagcagcgtgatttatagtcctttgggtatatacccagtaatgggatggctgggtcaaatggtatttctagttgcagaatcgccacgttgacttccacaatggttgaactagtttacagtcccaccaacagtgtaaaagtcttcctatttctccacatcctctccagcacctgttgtttcctgactttttaatgattgccattctaagtggcatgagatgatatctcattatggttttgatttgcatttctctgatggccagtgatggtgagcattttttcatgtgttttttggctgcataaatgtcttctgttgagaagtgtctgttcatgtccttcacccactttttgatggggttgtttgtttttttcttgtaaatttgtttgagttcattgtagattctggatattagccctttgtcagatgagtaggttgtgaaaattttctcccattttgtaggttgcctgttcactctgatggtagtttcttttgctgtgcagaagctctttagtttaattagatcccatttgtcaattttggcttttgttgccattgcttttggtgttttagacatgaagtccttgcccatgcctatgtcctgaatggtaatgcctaggttttcttctagggtttttatggttttaggtctaacatttaagtctttaatccatcttgaattgatttttgtataaggtgtaaggaagggatccagtttcagctttctacatatggctagccagttttcccagcaccatttattaaatagggaatcctttccccattgcttgtttttctcaggtttgtcaaagatcagatagttgtagatatgaggtgttatttctgaggggtctgttctattccattgatctatatctctgttttggtaccagtaccatgctgttttggttactgtagccttgtagtatagtttgaagtcaggtagtgtgatgcctccagctttgttcttttggcttaggattgacttggcgatgcaggctcttttttggttccatatgaactttaaagtagttctttccaattctgtgaagaaagtcattggtagcttgatgggtatggcattgaatctgtaaattaccttgggcagtatggccattttcacgatattgattcttcctacccgtgagcatggaatattcttccatttgtttgtatcctcttttatttcatcgagcagtggtttgcagttctccttgaagaggtccttcacatcccttgtaagatggattcctaggtattttattctgtttgaagcaattgtgaatgggagttcactgatgatttggctctctgtttgtctgttgttggtgtataagaatgcttgtggtttttgtagattgattttgtatcctgagactgctgaagttgcttatcagcttaaggagattttgggctgagacaatggggttttctagatatacaatcccatcgtctgcaaacagggacaatttgacttcctcttttcctaattggataccctttatttccttctcctgcctaattgccctggccagaacttccaacactatgttgaataggagtggtgagagagggcatccctgtcttgtgccagttttcaaagggaatgcttccagtttttgcccattcagtatgatattggctgtgggtttgtcatagatagctcttattattttgagatatgtcccatcaatacctaatttatggagagtttttagcatgaagcattgttgaattttgtcaaaggccttttctgcatctattgagataatcatgtggttcttgtctttggttctgtttatatgctggattgcatttattgatttgcgtgtattgaaccagccttgcatcccagggatgaagcccacttgatcatggtggataagctttttgatgtgctgctggatttggtttgccagtattttattgaggatttttgcaccaaagttgatcaaggatattggtctgaaattctcttttttggttgtgtctctgcctggctttggtatcaggatgatgctggcctcatgaaatgagttagggaggattccctctttttctattgattggaatagtttcagaaagaatggtaccagttcctgcttgtacgtgtggtaaaattcggctgtgaatccatctggtcctggactctttttgtttggtaagcaattgattattgccacaatttcagatcctgttattggtctattcagagattcaacttcttcctggttcagtcttcggagggtgtatgtgtcgaggaatttatccatttcttctagattttctagtttatttgcatagatgtgcttgtagtattctctgatggtagtctttatttctatggaatcgctggtgataacccctttatcattttttattgcgtctatttgattcttctctcttttcttctttattagtcttgctagcagtctatcaattttgttgatcctttcaaaaaaccagctcctggattcattaattttttgaagggttttttgtgtctctatttccttcagttctgctctgattttagttatttcttgccttctgctagcttttgaatgtgtttgctcttgcttttctagttcttttaattgtgaagttagggtgtcaattttggatctttcctgctttctcttgtggggatttcgtgctataaatttccctgtacacactgctttgaatgcatcccagagattctggtatggtgtgtttttgttctcgttggtttcaaagaacatctttatttctgccttcatttcgttatgtacccagtagtcattcaggagcaggttgttcagtttccatgtagttgagcggttttgagtgagattcttaatcctgagttctagtttgattgcactgtggtctgagagatagtttgttacaatttctcttcttttacatttgctgaggagagctttacttccaagtatgtggtcaattttggaataggtgtggtgtggtgctgaaaaaaatgtatatcctgttgatttggggtagagagttctgtagatgtctattaggtccacttggtgcagagctgagttcaattcctgggtatccttgttgactttctgtcttgttgatctgtctaatgttgacagtggggtgtaaagtctcccattattaatgtgtgggagtctaagtctctttgtaagtcacacaggacttgctttatgaatctgggtgctcctgtatttggtccatatatatttaggatagttaggtcttcttgtgaattgatccctttaccattatgtaatggccttctttgtctcttttgatctttgttggtttaaagtctgtttcctcagagactaggattgcaacccctgcctttttttgttttccatttgcttggtagatcttcctccatccctttattttgaacctatgtgtgtctctgcatgtgagatgggtttcctgaatacagcacactgatgggtcttgactctttatccaatttgccagtctgtgtcttttaattggagcatttagtccatttacatttaaagttaatattgttatgtgtgaatttgatcctgtcattatgatgttagctggttcttttgcttgttagttgatgcagtttcttcctagtctcgatggtccttacattttggcatgattttgcagtgtctggtaccagttgttcctttccatgtttagtgcttccttcaggaggtcttttagggcaggcctggtggtgacaaaatctctcagcatttgcttgtctgtgaagtattttatttctccttcacttatgaagcttagtttggctggatatgaaattctgggttgaaaattcttttctttaagaatgttgaatattggcccccactctcttctggcttgtagagtttctgccaagagatcagctgttagtctgatgggcttccctttgagggtaacccgacctttctctctggctgcccttaacattttttccttcatttcaactttggtgaatctgacaattatgtgtcttggagttgctcttctcgaggagtatctttgtggcgttctctgtatttcctgaatctgaactttggcctgccttgctagattggggaagttctcctggataatatcctgcagagtgttttccaacttggttccattctccccgtcactttcatgtacaccaatcagatgtagatttggtcttttcacatagtctcatatttcttggaggctttgttcatttctttttattcttttttctctaaacttccattctcgcttcatttcattcatttcatcttccatcactgatactctttcttccagttgatcgcatcggctcctgaggcttctgcattcttcacgtagttctcgagccttggttttcagttccattagctcctttaagcacttctctgtattggttattctaattatacattcttctaaatttttttcaaagttttcaacttctttgcctttggtttgaatgtcctcccatagcttggagtaatttgattgtctgaagccttcttctctcagctcgtcaaagtcgttctccgtccagctttgttccgtttctggtgaggaactgcgttcctttggaggaggagaggcactctgctttttagagtttgcattttttctgctgtgttttttccccatctttgtggttttatctacttttggtctttgatgatggtgatgtacagatgggtttttggtttggatgtcctttctgtttgttagttttccttctaacagacaggaccctcagctgcaggtctgttggagtacccggccgtgtgaagtgtcagtcttcccctgctggggtgtgcctcccaattaggctgctcgggggtcaggggtcagggacccacttgaggaggcagtctggcagttctcagatctccagctgtgtgctgggagaaccactgctctcttcaaagctgtcagacagagacatttaagtctgcagaggttactgctgtctttttgtttgtctgtgccctacccccagaggtggagcctacagaggcaggcaggcctccttgtgctgtggtgggctccacccagttcgagcttcccagctgctttgtttacctaagtaagcctgggcaatggcgggcgcccctcccccagctgtgctggtgccttgcagtttgatctcagactgctgtgctggcaatcagccagactccgtgggcgtaggaccctctgagagaggtgcgggatataatctggtgtgtcgttttttaagcccattggaaaagcgcagtgttcaggtgggagtgacctgattttccacgtgccatctgtcacccctttctttgactaggaaagggaactccctgaccccttgcacttcccgagtgaggcaatgcctcgccctgcttcggtttgcgcacgttgcgcccacccactgacctgcgcccactgtctggcactccctagtgagatgaacccggttcctcagatggaaatgcagaaatcacccgtcttctgcatcactcacgctgggagctgtagactggagctgttcctgttcggccatcttggctcctactccttattttcgtattttatcttttgtgaataatgctgcaatcaacatttccatgtaagtacctgtttgagtccctggattaaattctttgggcctatacccaggaatggatgttgtttcaaatgagaattctgtgattagctttttgaggaacagcaaaactgtttctcctagtggctgtacctttttatattctcaccagcaatgtatgaggattccaaattctacataatgctgctacttgttatttaacattttaaaagaattgtagccagttttgtaggtgtggtgtggtgtcccattgcagctttgactttgtattttcctaatgactaatgatgttgagtatcttttcatgtccttcttgactatttctataccttctttgaagaaatgtctatttgagtcttttgcccatttataaactggatggtttgtccttttgttattgagttgtagctagttcttgatattatttggacatgaaaactgcgtatatgtggtttgcaaatattttctctcattctatgtctattaattattgtcttaataatttcctttgatgcacaaaatgctcacatcttgataaagccctatttatcttgtttttcttgtttctcatgcttttgtatcatatctaagaatccattgcacatttgaggtcatcaatatttacctctatgtctattttgagatgtttttattgttataggtcttatatttaactcactgatgaattttttagagaatggtttgatatggtgggaggtagagttatctaaattcactgttttgcatgtggttatctagttgtttctgcactatcattggaaaggagaattgttcctccattaaattgtcttgacaccctcttcaaagagtaattcaccataagtgtgagggtttatttctagactctcaattctatcccatttgtctttatgtctattcttttgccagcagcttacgtctattctttggcagcagcttctgttttaataagtgtactcctttgtgagatttcaaataagaaagttcaagtcctacaatttattttggcaagattgttttggctattcaggggtccttttgtgaaaggtggggaggccaatgtttcacaattgggaaagccttttctgtcttcttcatggggaagtttgggagaatcttttaagaaacttaatctaagcaggtaaactgtcaccattttatttgctgaagtgctatgttaaagtgtgcattgcctcttgtggaagaattgtgagaccctggaagctcttgctcacatggtgagagatagtgaattccatgatgaggggcagagaggacagtgttttgggatacaatgttgttgggggagttgtatacatctcaacttctttatgtctctgtacagtgggtgtagggaccagccacacagggtcggtgggtttttctccccgtgtgcagagatgagagattgtagaaataaagacacaagacaaagagacaaaagaaaagacaaatgggcctgggggaccactaccaccaagatgcggagaccggtagtggccccgaatgctaggctgcactgatatttattggatacaagacaaagtgtcaggataaggagtgtgagccatctccaatgataggtaaggccacatgtgtcacatgtccactggacaggggacccttccctgcctggcaggcaaggcagagagagagaggagaaagagagagagcttacagcattatttctgcttattagagacttttagtactttcactaatttgctattgctaagtaaagggcagagcctggtgtactggatggaacatgaagggggagtaggagcgtgtccactgaagcacaacatcacagggaggcagtcaggcctttggataactgtgggtggacctgactaatgtcaggccctccacaagaagtggaggagtagagtcttctctaaactcccccggggaaagggcgactccctttcctggtctgctaagtagtgggtgtttttccttgacaccgaggctaccactagaccacggtccgcttggcaatgggcatcttcccagacgctggcattaccgctagacgaaggagccctctagtggccctgtctgggcataacagaaggcttgcactcttgtcttctggtcacttctgactatgtctccccagctcctatctctgtatcgtctggcttttcctagggtatgattatagaccaaggatttttataatattggaataaagagtaattgctaccaactaatgattaatgatattcacatataatcatatctaagatctatatctggtataactattcttcttttatattttattatactggaatggctcgtgccctcagtcttttgcctcagcacctgggtggcttgccgcccacaagtgggcatctccattggacacagtaggttttgaaatccttgtttatcctctggggtctaggtcttggcttgcctgttagctgcagctgaaagaggtgtctgctaaggcaatgacacctgtggggagaagaaaggttcagcagagtgaaagtagctgaggctcagagaggccaggaaagtctgactcttagaaaccgtgggtcagcagatgggtgtcctcacgggtacatgggcgatgccggtagccactgcagtggactggaagaaggtaagtgatgctgggtatcccatgttctctctcagctctgcagctgaagatttgggccttgggctggtacggccctgcagcaggggaagggtacacaggaatggctgcatatcgggacgaagtccatgtcatcttcttaggcattgttactgcagatggaggattctgttcagagacctggcctggacacatgggagggcccaccccattcttttaaaattattttaagagaacagtattagcaaatgtggtacatgtcttattctgctagaatcagtcttattgtcacgttttacaaagtatcttttaggaaatggtgagagccatccacactatgtggatttaaaggggactctagtataatttcagctttcctactctttatagaaaccatcttctctgcaaacacacaggcaatatctctgtgttcatttctattgggagccctgtatgcaaggtggagagtgccacatttccctctgagatgttatgtaaaagtttgaggtggagatgacatatctgacactctgttgttacactcagaagctactacatgtgaaattctaatgactgcattatcctgccaaataaaaggcaggcatgagcaaggacagtaaagaggggtgagagcctcatcatgatggggagtcttgttctgacatcttgggaaaaactgtccacagtgtgaagtcatcaacttcttgtcctggtttacaatttgagtggctgttgttatggtgtcaaacattttagtgagttctgagtggctcacgcttcaggtacaagggttttcccatgaaatttacattgagttgtccacctccagcttatagggcttctggaacagaatgggtcttgctcttagtgattccatgggagaaaatggaattggaggaactagtagaattcagggtaatgttcagtttacaggtggataataaaaacacagaaacaatgaacagagctgcaatctcataaccggtgtactacagtttttattttccacgtaatttttgtctctacgggcatctctagttttaccaatgataatttcagtagaataagtttgtttgcaaaataggttgagtttcttcaaacgtggtctgattctttacataagtgcagcaagagtagcaatggaccatgtagggtctcttttaaaattttctttcctctaagtttttataaggaatctgagattaaacttttacaaacctcttgagaataggaagccaaaccaaggctgacttcagactttgcctgcagttcatattggttcattctatgtatattcttaaatataacatcccagtcaaagccttggtaatataaccaatgatttgaaatgtgtcctgttacaaagagagcagattgttactgtacttgtgcaaatatgtgtattaccataaacatatcaattctcatgaatagttgcccaattctggggcagtcaggtagagagcaaaagtaaatatttcaataattgttcccagaagtatagtttattgaactgctataagctatagatagattaaaagaaaaaaattccataaatgtagaatacaaaccatttaaagaatcagcaaattttcaaataaaaatcataaaaacattatcctcattattatcaatatttcaatgaagtcaatgtttttcctgcttggtaggctgagagttttatgaagatatcagcctgttagttaaagtttttggaagttcttagacagtcctgtgggataatgtgaaagttatcggaaacttgtattaaagagtacttgtcagcatcttttctacaaatctccttgaaaaggaagcaattttggactgtagctgattggaaatgctttgaagaagaataaaaacaatgtctgttagtgggaaagattttaaatgactatggttaaaactctgatgagaattcattgataacacagctcacataaaaagttagttacttctgtagtatatgacattgtggctgataacatacttaatttctaggaatctcatacaatttctggaacaatcatatcagtaacatatccataaatataacatagagaaggtttagcatcctttaccatttatgatttgaaaatgcttttcatataattttacatatcaaataaagtggcttttccatgtagcttgtgtttctcaacaggattactgagttcttggtggaggctgttaatgaattgggccaagaaagtataggcttatgtatgctgaaaaatttccctagataattccaatactcccagctaataatcatgaatttaggtctaaattttacctattagaacagctgttatttatcctggttacacattagtagcatctgggaagacttaaaaattaccaatgcctgagtctcactttagaccattaaattggatcctatgggtggggcttgggcatccatttaaaaaaatgttttctggtgattccaatgtgtagctgtatttcccctcagatttctctgatttcttttggcattcacttttttctattttggtattataattattttttgggtcttatcatctatcttaggctttatgttccttggggtagaaaccttgccttcttcatttttgtatctttcacgaacatatgagttggtcatcaggaaaatgttctcaatcacaagtaggttgtgttctgagtctcaggtttacacattaatgcttgagtcattgttctctgggaggtgagaggttgcttgtgatgaagggtatgggtaagcccatactgcagatggtagatgggagatcaccctgttttcagccatagcattggaactaagcattctatgtgtatatcaggtggaggggaagggatgtgtagaaagacagatttaattagaatggaggaattatactagggaatagaagtatttaaagcaacaaaaattagtaaagagaagaaatgtgaacttatcaaataggcaagagtagatccctgaagatttttgaataggtgagttaactagaatttaggaagctaataagacagtcatacacaaggaagatttcaaagactggagataagtcaagcagtacctctagcagttgttgaggttgtgggaatggagagaatgacaaaagtgagaaatgttataaaaaaggatcaagagggttttataaggtattgaatctgggaaacaaatgagcagagactgaggataatcacttgtaggagacagtggggtacagggagcatgaagaacaggggagaagagacctgcaggaataaatgctgagaagcaggagtttagtgggaggaggaggagatccagtcccaaataccggcaaagaagtcctttccctctcccaagcaaggcagtcagccctgcaggaaacaggacaaaaggaaaagccatcatacctgccagtcttcctgaaataaactacaacagggctgctagatcagcgccacactggccagtacttcaatcatgatgctgccagtggctctacctgaaaggccaggagaacttcctttcactgaagtatctgtcatggaaagaaaagaagagaaggaataaaggtgatgttattttacagcgtggtaccttaggaaccatcactaagtatttagtagtttctactttttccttcggggattacattaattttgtgggacggttgctggtagatgattagccaactatattcttgcagtttttttctctctcaacgtgtttctaggttagtgatcagtcttctgtcaatttcatcctgaccatgctgcactcagatattttcgaaagctttatgatgtgagaaaggctgactgctattttctgtcactagaactttgtaccctttcatggttgcatctttttctcagtgtgtcagttgtggtaggcatgaataagactctgtcaggtctccatggcagcttgtgtttctcaagaggattactgagtccttggtggagcccattaatgaatagggccgagaaagtataggcttatgtatgttgaaaaatttccctaggtaattctagcactctcagctaataattgattaattaataatcaactgacttgattgacagaaggcccagatcagtgcattccaaactgacaacctactttgcatagagtcctcactttcctgaagctctcagcagggatatgaaagcaagcccagttctatgagactctgttttattctcctgggtgacttgtgggaagaccccctatcagtcttcccatgctctctttgaactgtagctaaatctttgtctttctccttcacaggaatgagatttgcatagtggtcccaaagttccccagacttttttcatgcctgccccactttccctcccaggcatttttcctaatacattatcctgcatgtctaatctcatctcggatgcatctcagtgggcataaactaacataccaggcttgatttttttgcacttagcttttttctgtctctcccacatgtagccagtaaccatgtcctagtgtttcatgtgttacccttttttcatgtgtataggaaaaaaatatatatttccatatacttatttatatgtaatatatataataaaatgtgtaatataaaatgtataataatgtaaaacatatacatattttccatatatgtatatggaaaaagaggtaacacataaaacaccaggacatttacatataataaaattgacatatgttatatatgtatgtagtgtctggtagtcttaccctctttataaatacacactttttgtcactgccccttccttccttcccatgcagagctcctatggccaaatctccctacttctccaagtttgtgtcactcactgtcctctgtgttgtgtcccatgtgctgtgtccacagcctcctagtgttttatgtgttctctttttctatatatatgtggaaaaagcatatacatatttctctgtatatatttatatacaatatataattatctaaaaatatagaatatataacaatttaaaatatatgcatatttccatatctatgaaaaaaggtaacacataaacactaggccatttatatataaaattcacatatgtaatataaatgccaattttatcatatataaataagtatatccatatagacttatcatatataaggtgaatttggaatgccctgacctgggccctctgtcagtcaagtccctgccatggaggccattcatggctgccacaactgagacactgggagaaagatgcaactatgaaaaggtgaaaagttctaaagtcatagaaaatagcaatcagcctttctcacatcccaaaaccttcaaaaatatctgagtgcagcatgtccaagatggaattaaaaacttcaatcttgaaaaggaaaaaggaagctggaggattcacactttcagatttcagcatctactgcaaagctacagtaatcaatacagtgtggtactggcataaaggaggacatagaaatgaatgacatagaatagagaacccagaaagaaagcttgcatatatggccaaatgatttgtgtcaagagtgtcaagcccattccttggggaaaggacagtctttttaacaagtgatactgggaaagctggctatccatggacaagtatgagttgaacctttacctcacaccatatacaaaaaaatgaacccacaatggatcaaagacctaaatggaagagtgaagactaccagactcttagaagaaaacataaggaaaaagcttcatgatattgaatttcagaatgatttatttgttataactacaaaagcataggcaacaaaaaagggataaattggacttcatgaaaattaaaaacttttatatatcaaaggccattatcaagaatgtaaaaaggcaagctatgacatagggaaaatatctgcaaatcatatatctaataagggattaatttccagaatacatgaagaacactacaaatcaaaaacagcaaaaacagaaaagcccaattaaaaaatggacaaaagactgaaagagggattttattaaagaagatatacaaatggccaatgaggacatgcaaggattctcaatataactaatatttagagatttgcaaagcaaaaccacggtgatacatgacctcgcacacattaggatggctttgataaaaacaacatgaacaacaacatcacaaaacaagtgttttcaagtacgtggaaaaattgaagctctttgtgtgttgccgatgggaatgggaagtgttatagccactgtggaaaaaatggcatggcacggccggctcatgcctgtaatcccagcactttaggagccgagatgggtggatctcttgaggtcaggagtttgagaacagcccggcaagtgtggtgaaaccccatctctactaaaaatacaaaaattagctgggtatggtggcatgcgcctgtaatcccagctactcaggacgctgaggcatgagaatcacttgaaccttggaggtggaggttgcagtgagccaagattgcaccattgcactccagtctgggtgacagagcaagaccctgtctcaacatcaacaacagaaaagaaaatggtatgtcagtttcttaaaaaaaattaaagcattaccacttgaaccagcaattctacttctggacatacagccaaaagtattgaaaaatatttgaacagatatttgtacactgatgtttacagcagcatcactcacaatagccaatgggtggaaacaactgaaaagtctattgaaagataagtggatgaacaaaaaggtatatccatactttggaatgttcttcaatcttagcaagggataaaattttgacacatggtgcaaaatggatgaaccttgaagacattatgcgaagtgaaataagccagacacaaaaggataattattatatacttccatttatgtaagatagttagaatagtcagttacttagagacagaaattagaatggtgattaccaggggttaaggggagaaggaatgagagttatcatttattgggttcagaggtttagtatagtaggataaaaaaagctctggaaatagatagtgttgatagtaacacaacactaaattgcacgcttagaaacagttaatagtaagtcttagatgtatagtgtctggtactcttaccctctctgtaaatgcacactttttgtcgctgttcctcccctgccatagagagcttctgtgagttaatctccctatttctccaagtgtccatcactcactgtcctctgtgttgtgttccaggagctctgtccacagactcagacaggcagtgacttcagagccaggacacagccctattcccattttttaaagccttacccatgggaggcttggcttctactggcagctcgatttagccagattcagaaccggccacccaggcaccttatccacatgccctggccccagcccaggtggagtcagggcagggtcagtcactgggcgagcccacagcaatgcagggagcagagtctgagctgcttctccctcaccaaggggcttcctcctctcattggagaaaagtgtgggcttgttttgaagcctctgatgttcatcgcagctcatggagtacacacacacacagacacacacacaaaggagacagaagggatgttttggtgacagaaacagcttgaccatgaggaccctcctctttctccctctgtgaaggcccttacactgcatagtgcttggggctgataaagccatttccctacatttctcaggctggacccaaggtcatccaccagaaatctggcaaacaaagggaagagaatctgtagatatgaattgggagtgttcaggagaaaaatttgggatttacttttgtgcatgggacacaggctgagaataaaaatgttttcctggctctttcttggaaagccagataggcttcacctgaaagcatattgccaatgctccagcgatccacttaccagggactctgattttcttggttgcgaagtttttgccattagtgactgggttatggacataacacagatagtccccactattctcagtagtgacttgggggataaagagctcttgtcctatttgctggttattcccattcagcagccaagaatactctgctgatgggttagagcccatgaggcaggagaggttgaggtttgaccctggatagtaataggtgtctgaagaataagttgtgggttcatctgggccatctggagcaaagagaataatgccacaggtaatgttatcagagggaatgggaagctcctggtctgtgaaaggggcacagtgttcctttttgccaagtcacaaccccgaagtcccagccaaacttcctctgtgttcactgaactggagtagtctaagaaattcacgtgttctcccatcacaagctgtggaaccagagtctcctaagaccagagaagcccctcccctcctgggcctacccaggtttttctggggcaggaagtcatggccagcttgggggtccaggggtaagtgtcttcatacttgaacctgagagggactgagaggcctggcctcatgttatgtggatttgggccggcagccttgtccatgaaggaaaagaggatactcacagagaacatccaggtgactgggtcaatttggctggtactcactacattcttcctttgacattcatagagtcctgtgtcactccttgtgatactgagtagagcaaggatcctgttgtcattggacatctttagcctgggactgagtgtgagtctatgaccatttacccaccacatgtagattgtgccatgaatgtcaggttcacaggttaagaccacagcctcctcatcctctgtggggttgctggtgacatagggcttgggaacattcgctgtgcagataacagagaagattcccctgtgtggcaccactgatttctccatgagcattttccaatcagagttgacatctcccacctctcagcaaatctaagtccttaaaagcccacagcaggtctgtgtgtcaaaagacagatggatgcatgatgatctgagggctcagaggccatggggccacctgctctgtgtgggagatgcacagacttctgaagtgtggattgagcagcaatattggtgaagtgtgaattgagcagggtcaaacaattagagtttgattaactttgtttaaattgagcagagcccaagtgaggcagcagtggctcatgcatctccccaaccgaagcaccccaccttatgacaatgtggttattatgaatacacaggtgtgaatgaaacaggcagtaaatcagacagcacccacctggccagctccacctggtcctaggaaccaccattattcccattatgtgtatgttacagctttttaggctacaaaatataaaatacaatcacagaatataaaatatgctattgtcaatacaaaatattgaatatgaagctgaatatgttgttccactttttctcactcttgttaagctttgctgattcagttttggaagtttctattgacacacacttaagctagagattctttcctcagctgtgtgcagcctaccagtaagcccatggagggcattctttatttctcttaaagtatttttaatctctagcatttcttttgcttctttcttagaatagccatctctgtttaaatcacccatctattcctgaaaggtgtctcctttttccatcataatccttaaccagagttgttttaaatttccagtctgataatttcaacatccctaccacatctgtgtctggttccaatccttgctctgtctttcaaactgcattttttttttttttttgccatagtctgtcttgtatttttttgaaaaccacacatgatgtactgggtaaaagggacttgagtgggtgggcattcagtgacacggtggtgagtgttgggagggaagggttctgtggttctggatgagatctgtgtcctgggctgtgaatgtcacaagtgcctctcaggtttttctttccattaggtgggatatgatgacttgaggaggctggagttggatacttcccctccccctggccagttaagctcccatcaaaccccagctaattaggctgcagtaaaatagtttctcttaaatttaggtcttaccaagaagaatataattcactgacaactttccaagtgtttttttcccttcttcctagaagaaggatgtggattctttttggatattgactgtgagaaactggtagagctccaggagctaagagtcataaatctgtccccctactcccaagactaatccatccactggtgtgtttatctctgcactgtgtccacactgagcctccagaatttcctcaattagagttcaggttttctgaccccagcacttgttcccgctgaggtttctgtgcctgtgtttctgctcaggtacggtgcgctgctctgtatttgcctgtgggtctctccaatatgtgggccagttagcactgagaccttgcttccagagaaatctaaatgagttgttgatttttcagtttgttcagctttttacttgttgttagaactgagtgaaaatttttaagctacttacatgcctgacggaaattcgaagtgtctagggcatgactggaggatatgagccccacagcaggttgaggatggagtcatgagtgaaatgggtgaaatgagcccatgggctttggaaactgcagatctgtccttctgcctctgaccccctggtgagtccatgaagaaagtgaaaccacctttgcgaagcataagatggtgagaggaagctagcttggctgaccgcatctcacctctagtctcaaactggccctcttctctgattcctggacataggccagggtaagcatgggaggaatttatagtttaactttgaagcaaggatgataatagtccctccctaaaattagctcctccttgtcgggggctaccttggtaaatctaagaaaagaccacgaattatgggaggggcccaaattctgctaaaatgcaggcatagtttctataatcccttacttctcaggagtcatgtatccagaggtcacaagatttgtgactttcctagttgctcctatagatagcaagactactgtagaatctgagatttatcttttgagatgtttcagacttttgcattctggcaaccagctgacctcatctagactcatgaccaatggctaaaccagtcatgtggcccccactcagaggcagattcaacaaatacataccattttgcctacgtgcatcatttcatctccagccggtcaacagtacttattccttagacctttgccccttcaaagtttttgaaaaactctaacctcagagccattggggaaggtgatttgagtcataataaatttctgtcctcctttttggcagccttgggctaagcaaaaccattctttactacacatcaccttcacaataaattggctttgcctgtgcagagggcaagaacctgtcaggtgattgtaagaatggatggaggagtcactgatctctttcaggtggcctgtttcatgagtcagcctctcagagggaaagagccctggactgggacacagtggaagctcattctcctggtgacccggggacattgcctcattatggatcctggcaggggtggctactctggctgattttggtgcatttttcatttcccagaaggcaggacaggcctcagtgtgagcaggaaggaaatggaaccgtcaatcttgttagagagggtgtctgggtaagtcctcagggtggaggaagctgtgcaggacagggctcatcaggtagaatgaaagggggatgcacttttttcactgaacacctttcagatgtctcaccaactctggcctcactgggctctgcctttccttctgagcccagagccccgagccctgattcctgggagggaggaagagagagaggaagggtgaagctgggatgtgtgctgtccaggtttcttccatctctggaatcttgaaagcgagggaccctagtgtgttaccacagaggagaccatgggaaaaagctgtttctcaggggtgcctggcttatgaattgaggggaattcagaccaggttggactcgtgaactgcagggactctgttccatgtcagcaaccagctcctctagctcagtgtttctctctgtggctaattcttttgtgtgatttctgagcccatgctagagtcctcctcacgatgcctgatggtcagacctgtgtggggagacctaatgatggggtgggggtggtcttgagtgtcacacagagtgtccagggaacaggctttgtgactttctctaccccagccccacaacaagatctggatagtgggcttggtcagataaagtcagaatccatggagggagggtatgtgtcctggcagtactgaggttcctgcctccaggttagttctcagtctctgcaaatacatttatgttgtgcatgtgctgtttcctggactgtttcatgtccctaacttcttgaacctgtctgcagataatgtcatgagaggtctgcatggaagtatatgagggctctctgattaggatgggtgtgttttacatagtgggtttttttttttcaccaaattgtggttgagtgtgtatatagaaacacatacatacttatattcattagatttgactatttatataaatttaatatacagatacatttctataaatatacacatatatgtatatgtgtatatatgtatatgtatatatgtatatgtatatatatgtatatgggtatatatatgtgtgtgtgtgtgtgtgtgtgtatatataaaatgtgccattttaaccacttaaggggagagagagagagaagagagtttctgctaataccaaatctgggttaaataagggtggtcctatttcctggggttgggcttttgctagatgtgtcagttcctgttggaagtgaggtagagaggttacatgcttaaccaatgtagagattttctatatgaaaataatctgtgagcacactgataagttttatccttttctaggtgaaaagcttggtgaaagattttaaggacttcccattggctgaaggctggcaaatggagtttgctatcctctgactgcagccattctgaggactggaaagaataccctgagaaggggcctattttatttctgcaggaaggtactgaggtttaatttatcttatggagtcttcctagattagaaggctttgaggtgtgttgatgccttgccagtgacttagctgcctgatcagtgaacctatttcctttggctacatcatctgttccccttttgatgttccctataatgtatcactgctatttctcatggaagaaaactgaggataataacctgttaattttttggtgatattttacaggaaatccattagtggtaagaaaatgccttttattttaaatggcagcatgagcatgaagaactcaaaaagcatacttggaatcagtgtaaatgttagctacctttcccttgcttaatttaagtgctcttgtaagaaccatttgtttagctgattgagcacctgcacctgaagggagatgttatttagagtgactactgcttatcctgccatatatatttcttgctttaccagctgtttgttagctaagagctccctctagaggaaagtaattttgccacattaagtggggatgtaaaccgttctttcctagggttaatttggaggcttttctgactagtagagctattgtgacagtggtttggaagcagatgtaaacaataggtcctcctaatggcaaataagaggttgagaaaaatattggattagaatttttcctgagacaccccttatggttgtgctatgggaagaggggaggcctggataagaaaggagaaaagagagagactagatctagtgtttagaaggaggtctactttcctccctataatttccagaatgacctgtgtctcctgtgctgtaatggcagtttgagctgctggagccaggggtttgagccccaggacccatcagtcttgctggaccactgtgagactggtactgaacccagtgacctccaactctgggagcagttgcatctccagtggtctccaccacaggctggtcattgtcaaggtggcttcctcttgctgtttggacactccttcctaaaaatgccctggcttgccacaccgagagcaactagtggatacacctctgggatcctggactttgcaactctgcaaagtagctattagaggctttgtccttctcttgagctttctctctttcttctgggccttctcctggtccctattataaaagactgaagtggctaccctcagaaggttttccaaggtgctatgtgctactatagcttgccttttgtaggttccttctaatattgggagcattctgtataataaacttatctttttgaatgggctgtcacttgagtgaatcaggagataaaaaggtgtgtgctaatagtgcccctcttaacctatccataaaggctgcaggattctcctctggctttgagtctatcatagacagtttagaggaattaagaggtctggccttagtttttcttttccattcatctgctgagctattggggcttcaatcagggttgccaagaggtactgcttcacttcttatttggaatggtgtttctgctatttcttcactttctgtatctccttccttcccttttggtgtattataggagatatgttgctcatcttcaaaattctctggtgcttgtagagctggctgtttttcagttacagttagggtttggtttaggagcagcataacatccttccatgtgaggtgaaacacctgacttaaattctggaaagcttctatatacctatcaggattgtctgaaaatcagcctaagtcttactttatttgcctaaggtcctgtaatgagaagggaacttggagggaccccaaattatggggattcttctcagatggttccctgggaagttgcttttctaattctaggggattattctttataggccttcctgatatggctgttaaaaaaatctgggttgctgttacaatgcttctaaagttttagtaaaaatgccctgtcattgtgcaaaatagaatgagttgcttttctcttcaaagtcctgaggttaaaagagttctagtgcctcagagtgcactccagaggggtgcaaactgaagatgctctgttagccatcgagaaaaagaagtgagaataaaagtgtccttatagtcccccttctttcattgttacccagagtcatgtggaagacagtgggagcatccccccaactgttttctctccttggttcctgagtcctggcactgtgttaaatttgccacccatggttgtaggtgtggccctctaagccatggaactggataaatgaagtgatgacattagccacactttacccatgcagccttagcttatctgcctgtgatctgcctggcctcctgaaaaatggatctctggtgaaattgtaatagttgcctttgagcaagctttctttaagagagggaatgtgccagttgccagttatggcccatgctaaaacacttaccctcagaaaagtggtcctggttgactctgttcttaaaatgtccttactaattaaatactgttctaattggagatagaataagtaccttaaatgaacgtagggacctaatggcagtttttcctgctgatgggacagtatcggaactaaaatttggctatggaagacattttactcctaactgttgaaagcagagctttcccattcacagaaagggcttttctatcagtgcaaaaagagagaattggaaaagtgcagtgttatggcaaaggaccaacaatgtgcctcataaggaggatttatgtttccactaggtgacactgttggcttagaaataccaagtgcttaccaaaggaaggagagagagagagaaagagagagggagggacctattgggttagttattataccatgtaccgatctttcctaacagaactgtttccctgaaccgtaaaaatttccacatattgcaaacacaaaaagaacaggagacatagagaccatggatagaaaggaagaacaaatttgcaacaggatagcaaattaggagacccattaccaacatctggatgagctgccggaagctgtgttcagtccagaagcctttgaataacatcagggtgtttcctggccagaaattctcagctgctccatgacatcccccagcgtcatgtgatggtgaggttctccatgaaaggaaactagtttgaagagaaccttgaaattaaaggacagatttgaggtttgctccatactcaccattctgatgtttctatcttctgttctgatcacaatcccagatgagaactcccaaataaaatggctctgtttgggaatctattcatggttctttgtcacacactgagaaagaattcgggacatggaaacacgtgaggagtgggtttaggagtgaaaaatttaacagacaataaagaagagagagagaaaaagctttctcatactgagaaagcagtcacccgagagagggtctccaatttgtggtggaatgcaattgattttgtacagagacttgaggaggcagtgattgatttacatagggtccagggtattgttttgaccaggtgtgctgtttacgtagcccgagaaaagactggccctcccaccttaatcttttattatgccattgtggcttctacctggtggtcatcatgacacctgcacatatggtgacaaggaaaaaagtgcaggaactgccatattgggagtacctggctcttagttgcctgcatctgtatatgcttatctatgcttgcagcctgatcattcagtctgttttctgttagaaatggtttgggggctgcgttttattaaaggaaaattccaccaagaattcttttaccctttctagctgcctaaaaataatttctcaataactcctgtattaggacccctttaggaaaacagaaaagaagacacagactctcctgtaggaaagtaaccatagtttttttgtcatggagccccaagagttgcaagtgaacggatttctctcaggtctaaaactctgctcttttctccattgtgttacctgacctctttgccttttacattactttgaactgtaaaaatatttgaccttgtgtgtgtaatggttgctgggtcagtggtaagagctatggttttgaaagtgactaacagtgattataataaattattctggcttcagagggctactcatttccttgcatgtttagatgcaaaagacacagtttaaacaattagggaaatgcctttgtagcaaagtactctgtggaagtgttgcacagtatggtccccactgcattgtcctcttcttggggacctgggattcagtgaaatccttgatttttaatgtctaaatgttgtcccttccaactggtgcccttttttacatatttaaatgattagaatctaaaaattgcaaagactttgttggccctcttccttaatgggctctaccttgagcacagtgattcagttgaagaaaagagaccaaattaaaagctacatctctaaataaacaacaggtgctggagaggatatggagaaataggaacacttttacagtgttggtgggagtgtaaactaattcaaccattgtggaagtcagtgtggcgattcctcagggatctagaagtagaaataccatttgacccagccatcccattactgggtatatacccaaaggattataaatcatgctgctataaagacacatgcacacatatgtttattgcggcactattcacaatagcaaagacttggagccaactcaaatgtccaacaatggtagactggattaagaaaatgtggcacatatacaccatggaacactatgcagccataaaaatgatgacttcctgtcctttgtagggacatggatgaagctggaaaccatcattctcagcaaaccatcgcaaggacaaaaaatcaaacaccgcatgttctcactcataggtgggaattgaacagtgagaccacatggacacaggaaggggaacatcacacaccagggcctgttgtggggtgggaagagaggggagggatagcattaggagatatacctaatgttaaatgacgagttaatgggtgcagcacaccaacatggcacatgtatacatatgtaactaacctgcccgttgtgcacatgtaccctaaaacttaaagtatactaaaaaataaataaataaaaccccgtggtaaatttctattatttttgtgttaccttggcatctctttttaatcttccttgaacacaccaaattttttcttgaaaaagcttaagttctctctctctctctctttgctttgagatgtaaatgtgctatttattttctctaaaactcggtaaagccttcctcagataaacgttaacctttaccatttacaagaaagcaatttgaatccaactatcctttaaactggtgggttttactgatctcatgcctaaagtcctaaaatcaaaattctaaaatccttttgtctctctctatctttatgtgaacatgtatatgttatatgttttatcacatatatgtatatgtcacacatttatatactgttgacacatagtttcaaattaatgtaaaaataaatgagtactcacaaattaagtgaataagccaaaatgcttttctatacatgtgattttaataacctttggtgaatatagatagttttaaaattgttggaaaataaagtataaacgtcttcataatttaatttatacgtttttgcctaggtctgttggcaggcaggtttatattgtctttactagatgttttaaggtcatcaaacagttgcttccatatatatacattttcttaatttgtctgtgagcttatgtctttatatttgaagctttaaattctgagttctagatgagtgaccatagtaagaactggggacaaaacccatcccagcctctggctgtgccttttggccatgctgggagaggtgagattatccaggcattttcttcatagctctgttctttgtcttgggctttgcatctggtacatagttagaatgatttactccctagtttttttctactgaaaataaggctgtataagtctgtttttacattgctacagacaaataaatgaacctgaataatttataaagaaaaaagtttgaatggtctcatgattcagcaggttgtagagtaagcatgattctggcatctgctcagcttttgaggaggcctcagaaaacttacaatcacggagaaagccaatggtggaggaagacatcttatataatgggagctggaggaagagagcaagggttgcacactggtaaacaaccagataaaaactcactgttgctacaacagcaccaaggagaatggtgttaacatatgagaaaccacctccatgatccaatcacatccaaccaggctccacctccaactttggagattacaatttgacatgagatttgggtgggggtaaaggtccaaaaaattattattctctccatcttccctcccaaatctcatgcctttctcatatttaataatataagaatggcttcccaaccatctctagagtcttaactcattccagcattaactcaaaagcccaaaatagcaagtttcatctgagacaaggcaagttcctttcacctatgagtctgtgaattcaaaaacaagttagttactttcaagacacaagggagatctaggcattgggtaaatactcccattccaaagggaagaaataggctgaaagaaataggatacatgccccatgaaagtctgaaaccttgcagcacagtctttaaaacttaaagctccaaaataatctccattgaccccatatctcatattcagggcacactgatgtaaggcttaggcttccaaggttctgggcatcacaggaacattctaagagagtcacaaaagaatttgtagtgtggcttttgatgctaaacagcgtattagaccaagtaagtcactgaagagaaaaaagtcagaggagaagatgggtgagggtgacagaaatggaatggtgaaaggaaaggtctgataaaaatgtttaccggctgggcatggtggctcacacctgtaatcccagcactttgggaggccgaggcgggcagatcacgaggtcaggagtttgagaccagcctgagtaacatggtgaaaccccatctctactaaaaatacaaaaattagccgggcgtggtggcatgcacctgtaatcccagctactcaggaggctgaaggcaggagaatcacttgaacttgggatgcggaggttgcagtgacctgagaatgcagcattgcactccagcctgggtgacagagtgagactccatctcaaaaaaaaaaaaaaaaaagttcacccaagggctcatctggtaccttgctctgtgactaatatcttacacttttgatttactcttccactttcattttctgatgctcaaagggtcacccttctgctgaagatgagaaaagaggctgagggagctcaaatgagtggtctagagtcatccagctacttcatagagtttgtgtgtttcaccttgacatttgcgcacagacagaaaagtgagacatggaaggcaaagcaagtttttgctgtgggtgacatttatgaaagttacctgtgtttgcagaataatggactcctaaaatgtttgcaccctagctccagaacctgtgcatttacttttcttggtaaaaacacagtgcaggggtgataaaattaaaatcttaagatgtagatgttattctagattatctgggtgggcccattgtaatcagaagtgtccttgtaagtgacaaagaaaagcaggggcatcagtgtgagaatgatgagcctgtgaaactccactggccaatgctgggtgtgagcatgcatcaaaagacaaaattacaactaatgtagttatagattttatttttcatttattatttgaggcagctctcactctacaaatatagtgacagccctccctgggctatacaataacaaaacagtgggttttgtcaagtgggaaccagtaaacaaagccatataaataaataaattggttaacattagggtacttcaggtctcttttctgtaaaagttaaagcagaggaaacttttattatgctgtctcaggtagagtggaatctcctgttttcaacaaaaaacaaaggtctgttctggtatctctttgcttcattaaaacttcagttgtagactgtagcatttagcatgagtcgttctattttggagtctctaggctctcacttaggtgagagtgtgaccaaaatttaaagcattggcattcatctcagtaaccatcattttgggcttccatcatttatgagtttatgatgtcttcctgatcacacatttctttgagtttttgtcatttcagccaaagagagaccctttggtatttgttgatggctgcacacaaaactttttaaaaactcttgtagaattcaccacaccaaaatgtagaatttaaaaacctgtagaatttatcacaccagagaggctactagtatgactattaggaggataataccaaaagtttggagtatgcactttaggcaagatgcaaaccaagtaaaatagaatagatcaaagaatgagccagaagagtctagcaattttaaccaagtagtatgtttggtaacttctgtgattgagtcattatgatactcgatgtatttgtttatgtgcaacaatcagtgtcagaaactgcacaggctcctccctgttcagctggtagggaacaattttattatgtagcattcgacggctcattaaattaaaacagggagtgagaacaagtgagtctgaaaatgtaactttaaaaggggccactgtacatttgaagaaacaattgtgttaaagatggtgctaatgtcagccattgggtggactaaatgatatcttatgtaaaaatttgagggtgacatgatatatctgtcactctgttatgctactctcagaagctacttcacatgagattctaatgataccatcatcctgccaaatgaaagaggcaggcataagcatggacaaattaagaggggtaagagcctgattttgatgtgaagacttgttctgacaacttgggaaaagcttttgacagtatgaagttgtcaacttcttaccctggttttcagtttgagtgtctgtagttatggtgtcaaacatattggtgagctccgagtgactcattcttcaggcacgagggttttcctgtgaaatttacattgagctttccacctccaacttataggacttcagtaacagagcagattttgttcttactgattcaataagaaaaaactggatgggaggaactagaagaattcagggtctagtccagtctaccggtgaataataaaaactcgaaaacaatgaacagagctgcaatttcatagcaggtatactacactttttattttcaacattatttttctctctataggcatatctatttttaccaaagaaaatcccagtaggacaaatttgtttacaaagtaggtttagtcttatcaaactttgccaggattctttacataagcgcatcaagagtagcagtggaccacagaggctcttcctaaagtttggttcgctagtttttataagtagtctcagattaaacttttacgaacctcttgagatgaggaagccgaatgaaagccatcttcagactttgcctgcagtacatatgtgtccattctatgtatattctcaaatataacatcttagtcaaagccttggtaatataaccaatgttttgaaatgtgtccttttgtaaagagaagattcttactaaacttgtgcaaatagctgtatcatcataatcatatgaatactcatgaatagtttcccagtcctgggacagttaggtaaagagcaaaaatcaatgagcttcaattattgtttccaaaagtatactttaccaaatttctttagatataactagcttaaaagaagaaaaattccataaatctggaaaaaatcatttaaagaatcatcaaattttcaaataaaaattataaaaacattatccacattatcatttatttcaatgaaagtatttttgttctgcttggtctaggttggcacatttcatgaaggcatcatcctgtttgttaaagttttgaaagtctatagatggtccagtgatataatcttgaactgctcagaaacttgtatgcaagagtacttgtcagtatcttttccataaatcttttgaaatagaagcaattttggactgtagctgattgcaaatgtttcaggaagaatcaaaacaactatctgtgaatgaccaacatgtaaaatgactattgctaaaactctgataagagtttggtataagaaagggagtaactccagccagtactctagtcatgatgctgacagtggccccaactgagagaccaaaagaactttcttatcctgaagcagctgtcatggaaaaaaaaagaggagaaggaataaataataaagacagcaagggttttagccaattattttttgagatagggtctcactctgttgcctaggctggtgtgcagtggcacaatctcagctcactgcaacctgtgcctcccaggctcaagcagtcctcccacctcactctcctgagtagctgggactacaggcacacaccaccatgcatgcttaatgtttgtattttttgtagagatgggcttttaccatgttgttgaggcttgttttgaactcctagacttaagttattcactgccttggcttcccaaagtgcagggattacaggtgtgagccacctctcctgccggtttcatgctttttataataagaatgaactccttatgtaataataaataaataaatgaaattatttgctttggatgtaacaaatgtagatttagattgtccagagtcaggagctaagcctcatattttttttgttttagctcagtgtagagtgcattgaaggtgtcctaaaaataattccatatagtaagccaattttaaaccctgctcacagccaggtctgccaagtatgagccaggtaaaattaccaaaatgggtggttctgactgactccttaacaataacgtggcttacaaacaaagactgatatgaaatagttgatccaacccaaacagtttgctcattttccaaaattttctatacaaacatatgcaacttaccacaacatagagatcataatgaaaggtttcccttttattcctttaaatgaccatatgtttagatctgatgtactgacagcaataattctccattaagcagaaacctaataaaatttgaaaaatagtgattttatctttagatgatactcagatcttctgctacatatgtggaaaatggaattattgctagaaacattgtttaaagattagggtatgcaaggagtattaggaagtcaggaggttctttctttaggaaacagcttatctggattcattcaaagagctttaggcgagtttgaggtctttctgcaaaatgtaaattgctatctgagaaaccatatatagtccaatgatgaaagaatgcaaagccttagaagcacaggagacaattccagtatcttccctaaagttctgacaaaaaggaaaataactatcaaattcttcaactcgaatgcttattatgtatgtataagtcaatcggcagatgaagagaggctggaaatatgacttctacccctagggaactcacagtcttgtgggggccactaggggtggtggtgtgacctgcctggagcagcgctaagtatggacttgtgagtcaagggctatcaaaacctaagtaaactgattgctgttcagagaaggtagagttccattccacagtttgcaagaaggactgttttatggaggaggtcatgttggactagaccttaaaaagttggtagaatttaaaagcaaggatatggaagcaggaagagtgaaagtgagcagaggtacagaagtgaggcaagggtgagcagttttaattttttaatggtggtataaaatacacatcaatatttgccatattattattattattttggagacagtgtctggctctgttgcccaggctggagtgcagtagctcaatcatggctttctgtatcctccacctcctgggctcaagcaatccttgtacatcatcctcctgagtagctgggaccacaaacatataccaccatgcccagctaatttttatatttttgggagtgacaaggtcttcctatgttgcccaggctggtctcgaactgctggactcaaatgatcctcctgccttagccccaaagtgctgggactacaggtatgagccactgcacctgaccccatcttaaaaatttttaagtgcacagttgagaagtacatttgcactgtgcaaccatccgcggcaaccatcttcagagagtatttttcatcgtgtaacagggaaaattcatatccatgaaacattaactcctcattcttcctcctccccaccccaggtaaccactattccagtgtctctatgattttgactgctctagggacttatataaatgagatcatacactgtgtatctttttgtgactggcttatttcacttagcataatgtcctcaaggttcatccatgttgtaacatatgtgagaattttttccttttgaaggctgaataatatttcgttgtacggatggaccaaattttgtttatccattcatctatccatggacacttggtttgccttcacattttggctattgtaaataatgctgctataaacatggaggtaccaatatctgtttgggtctctgctttcaattattttgggtttatacccaggagtggaatggccaagtcatacagtacctgtagttttagttttctgaggaaccaccataatgtttttcacagtggctgcaccatcttaattcttatgaatagtgcacaggggttccaatttttccacagtctccttaacacttactattttctggggcttttgctttgtacttgagagtagccatttaaattggcataaggtataatttcattgtggtttacattttcatttccttaatgattagtgatactgatcaatattttctatgcttgctggccatttgtacatcttctttggagaaatgtttattcaggtcatctgcctatttttttaaattgggttgaatttttttttgctgttgtttaggtagagaaggcaatctttgaataccagtgatgtttcactaatactgggccattgatttcacaagaagttgtatgaggtactagaatgtgtgtttggtttcaatcatggctggggttgaatgccttttccaaaattcagtgtgaatttcaccagaagccacaaagggtccaggagcaagaacatggtgtgactgctctctgctaaagaatttcagcctgatgacagtgagcaggctacacatgagactgacacaagaataggtggagagggagactttccactggaagaaggtgattctaacatgcagaatcaccttcaaggagcaagtaagcagaaaaatagacaatggcacagtggccaggcaagaagacactaggtccagaatctgaggttcaaatcctagctctgtgagataaaaacatgccttggttttcccatgctactgaaacaccaggggttgggtctaggtccctttgctcactgcacagaaagccaaccactgagacaatgagcattgccagggaagaaggctttatttgggtgctgcagccaaggaggtgggagatcagtcttaaattcatctctccagccgactcaaattggagggtttatatagctgggaagggaggtagctacctgcagggaaaacagcaattaaggaggggtaaggaagcaatcatgataaatgaggggtctggtgtctcattgtctgatggtgatttggtgaatttcagtctcttgcctgaaggtctgtttcctaactcagatgactgacaaatgttaagtttcaagttttaagaccagatgggtcaatttctatgtttattcaaaaaccctgtaaatatcagttctatgtggaacttgagctggtttcccccaagtcatcacagttagggttaaatgatgcaatataagtaaaacaccagcagtttctgacacacacacagagtgcatgacacaagtggtgtgttgggacaatatagctcagtgaactccctttgtctactcagttatattgagtgatgaggcatctctgaagatgccactttgctacttctcccctgataatttcaccagatccagccatatgagcactgcaagtggggacttagcttaaatcattcctcgtatttcctgtgcaggcaaatcatttggcaccaaaacatgcacagaagtccaaatcctgctgccagctccacgactgatgacacagacagacttcaggattagtcctttaatctctgtcctctattaaatgaaggtcatcatgctgctgcctaatgtaaaaggattgtggggattttcatcattcattaccgattatcttattctttgaaaccccaagaaaactatacaaattccaaagtctaataggtacacaagggctttattatggatgatgaagtttcaaaggatgctaaaccaaaaaaaaattgtttttctttttttttttggatttatttttttatttatttattttattatactttaagttttagggtacatgtgcacattgtgcaggttagttacatatgtatacatgtgccatgctggtgcgctgcacccactaactcgtcatctagcattaggtatatctcctaatgctatccctcccccctccccctaccccacaacagtccccagagtgtgatattccccttcctgtgtccatgtgatctctttgttcaattcccacctatgagtgagagtatgtggtgtttggttttttgttcttgtgatagtttactgagaatgatgatttccaatttcatccatgtccctacaaaggacatgaactcatcattttttatggctgcatagtattccatggtgtatatgtgccacattttcttaatccagtctatcattgttggacatttgggttggttccaagtctttgctattgtgaatagtgccgcaataaacatacctgtgcatgtgtctttatagcagcatgatttatagtcctttgggtatatacccagtaatgggatggctgggtcaaatggtatttctacttctagatccctgaggaatcgccacactgactttcacaatggttgaactagtttacagtcccaccaacagtgtaaaagtcttcctatttctccacatcctctcctgcacctgttgtttcctgactttttaatgattgccattctaactggtgtaagatggtatcttattgtggttttgatttgcatttctctgatggccagtgatgatgagcattttttcatgtgttttttggctgcataaatgtctgcttttgagaagtgtctgttcatgtccttcgcccactttttgatggggttgtttgtttttttcttgtaaatttgtttgagttcattgtagattctggatatcagccctttgtcagatgagtaggttgtgaaaattttctcccactttgtaggttgcctgttcactctgatggtagtttcttttgctgtgcagaagctctttagtttaattagatcccatttgtcaattttgtcttttgctgccattgcttttggtgttttatacatgaagtccttgcccatgcctatgtcctgaatggtaatgcctaggttttcttctagggtttttatagttttaggtctaacatgtaagtctttaatccatcttgaattgatttttgtataaagtgtaaggaagggatccagtttcagctttctacatatggctagccagttttcccagcaccatttattaaatagggaatcctttccccattgcttgtttttctcaggtttgtcaaagatcagatagttgtagataagcagcgttatttctgagggctctgttctgttccattgatctatatctctgttttggtaccagtaccatgctgttttggttactgtagccttgtagtatagtttgaagtcaggtagtgtgatgcctccagctttgttcttttggcttaggattgacttggcgatgtgggctcttttttggttccatatgaactttaaagtagttttttccaattctgtgaagaaagtcattggtagcttgattggaatggcattgaatctataaattaccttgggcagtatggccattttcacgatattgattcttcctacccatgagcgtggaatattcttccatttgtttgtatcctcttttatttccccaagcagtggtttgtagttctccttgaagaggtccttcacatcccttgtaagttggattcctaggtattttattctctttgaagcaattgtgaatgggatttcactcatgatttggctctctgtttgtctgttgttggtgtataagaatgcttgtgatttttgtacattgattttgaatcctgagactttgctgaagttgcttatcagcttaaggagattttgggctgagacaatggggttttctagagatacaatcatgtcgtctgcaaacagggacaatttgaattcctcttttcctaattgaataccctttatttccttctcctgcctaattgccctggccagaacttccaacactatgttgaataggagtggtgagagagggcatccctgtcttgtgccagttttcaaagggaatgcttccagtttttgcccattcagtatgatattggctgtgggtttctcatagatagctcttattattttgagatatgtcccatcaatacctaatttatggagattttttagcatgaagggctgttgaattttgtcaaaggctttttctgcatctattgagataatcatgtggttcttgtctttggttctgtttatatgctggattacatttattgatttgcatatattgaaccagccttgtatcccagggatgaagcccacttgatcatggtggataagctttttgatgtgctgctggatttggtttgccagtattttattgaggatttttgcatcaatgttgatcaaggatattggtctaaaattctcttttttggttgtgtctctgcccggctttggtatcagaatgatgctggccttataaaatgagttagggaggagtctctctttttctattgattggaatagtttcagaaggaatggtaccagttcctccttgtacctctggtagaattcagctgtgaatccatctggtcctggactctttttggttggtaaactattgattattgccacaatttcagctcctgttattggtctattcagagattcaacttcttcctggtttagtcttgggagagtgtatgtgtcaaggaatttatccatttcttctagattttctagtttatttgcgtagaggtgtttgtagtattgtctgatggtagtttgtatttctgtgggatcggtggtgatatcccctttatcattttttattgtgtctatttgattcttctctcttttttctttattagtcttgctaggagtctatcaattttgttgatcctttcaaaaaaccagctcctggattcattgattttttgaagggttttttgtgtctctatttccttcagttctgctctgattttagttatttcttgccttctgctagcttttgaatgtgtttgctcttgcctttctagttcttttaattgtgatgttagggtgtcaattttggatctttcttgctttctcttgtgggcatttagtgctataaatttccctccacacactgctttgaatgcatcccagagattctggtatgttgtgtcttcattctcattggtttcaaagaacatctttatttctgccttcatttcgttatgtacccagtagtcattcaggagcaggttgttcagtttccatgtagttgagcggttttgagtgagattcttaatcctgagttctagtttgattgcactgtggtctgagagatagtttgttataatttctgttcttttacatttgctgaggagagctttacttccaagtatgtggtcaattttgtaataggtgtggtgtggtgctgaaaaaaatgtatattctgttgatttggggtggagagttctgtagatgtctattaggtccacttggtgcagagctgagttcaattcctggcttgattaggtaaataaagcagccaggaagctcgaactgggtggagcccaccacagctcaaggaggcctgcctgcctctgtaggctccacttctgggggcagggcacagacaaacaaaaagacagcagtaacctctgcagacttaaatgtccctgtctgacagctttgaagagagcattggttctcccagcacgcagctggtgatctgagaaccggcagactgcctcctcaagtgggtccctgacccctgacccccgagccgcctaactgggaggtgccccacagcaggggcacactgacacctcacacggcagggtattccaacagacctgcagctgagggtcctgtctgttagaaggaaaactaacaaacagaaaggacatccacactgaaaacccatctgtacatcagtatcatcaaagatcaaaagtagataaaaccacaaagatggggaaaaaacaaaacagaaaaactggaaactctaaaacacagagcgcctctcctcctccaaaggaacgcagttcctcaccagcaacggaacaaagctggatggagaatgactttgacgagctgagagaagaaggcttcagacgatcaaattactctgagctacgggaggacgttcaaaccaaaggcaaagaagttgaaaactttgaaaaaaatttagaagaatgtataactagaataaccaatacagagaagtgcttaaaggagctgatggagctgaaaaccaaggctcgagaactacatgaagaatgcagaagcctcaggagccaatgcgatcaactggaagaaagggtatcagcaatggaagatgaaatgaatgaaatgaagtgagaagggaagtttagagaaaaaagaataaaaagaaatgagcaaagcctccaagaaatatgggactatgtgaaaagaccaaatctacgtctgattggtgtacctgaaagtgacggggagaatggaaccaagttggaaaacactctgcaggatattatccaggagaactcccccaatctagcaaggcaggccaaagttcagattcaggaaatacagagaacgccacaaagatactcctcgagaagagcaactccaagacacataattgtcagattcaccaaagttgaaatgaaggaaaaaatgttaagggcagccagagagaaaggtcgggttaccctcaaagggaagcccatcagactaacagcggatctcttggcagaaaccctacaagccagaagagagtgggggccaatattcaacattcttaaagaaaagaattttcaacccagaatttcatatccagcccaactaagcttcataagtgaaggagaaataaaatacttaagagacaagcaaatactgagagattttgtcaccaccaggcctgccctaaaagacctcctgaaggaagcgctaaacatggaaaggaacaactggtaccagccactgcaaaatcatgccaaaatgtaaagaccatcgagactaggaagaaactgcatcaactaacgagctaaccagctaacatcataatgacaggatcaaattcacatataacaatattaactttaaatgtaaatagactaaattctccaattaaaagacacagactggcaaattggataaagagtcaagacccatcagtgtgctgtattcaggaaacccatctcacgtgcagagacacacataggctcaaaataaaaggatggaggaagatctaccaaggaaatggaaaacaaaaaaaggcaggggttgcaatcctagtctctgataaaacagactttaaaccaacaaagatcaaaagagacaaagaaggccattacataatggtaaagggatcaattcaacaagaagagctaactatcctaaatatatatgcacccagtacaggagcacccagattcataaagcaagtcctgagtgacctacaaagagacttagactcccacacattaataatgggagactttaacaccccactgtcaacattagacagatcaacgagacagaaagtcaacaaggactataactttttataagatacatatgggtttactactaaatattcttaaaatgaatataatgctataatattcttattttgaggtaatatatatatatagtctgcaaaaattaggtttcctggtgtcattaaccacttatgcaattatttttctgaaatgaatacacatgctgtacatgcagttttgcctgatataagttttaaaacaacgtatattggaatcttggaactaaaaatgagaaaatcagtgtccccttgatgtcagtttcagtttcaactgcacttgctattttatttttaattggttacttacattatctgtacattgtcacagttgatggtatttgttttcttctctgtgaccatagtttgcacagatttaaccataatgcatccttaaagattacaagaaatcttttagacacagctcctctcagttgctgaggatcgaacctttacttatgtgttttcttcatgaatatatatttcctgtgttgtatgtttgtacatagctatttgtagcctttgaagtttatggaagtttttttggttgcattcttggggtatattttctttccctgatgactgttaaggttaggatatttgacccttccaaagctcatgttgaaatttagtccccaatattggaggctgggcctaatacaaggtgtttgggtcatggggacagatccctcccattgaatagattaatgtcctctcctgatggtgaatgaattcttcctctattagttcctgcaagacctggttgttaaaagagcgggccacctccccggtttctctcttgcttcctctctcatgtaatctctgcacatgctggcttcccctcctctactgccatgaatgggagcagactgtggccatcaccagatgaagatgcccaattttgaactttccagacaccagaatcataagccaaatcatcccttttcctttataaattatccagcctcaggtattctttatagcaacacaaaagggacaggactttttatatcttgccccactgtcttctagcatttcatgtgtcccataaagaaatcttagtctcctaggttttttttttttctgaatatccacagaattctttccataacttcaaataccaggaatttattggggtatttgttaattattcaatataaacacagccttgtaattcttgggctatttctgtctgcagattcaaatttcactgtatttcaggaatttcaccttgaattgtatctttgaaaatttgttttcatgttccattcattttttaacccatgcaaggcatttagtgttatagatatttgatctcttccctaccactccctcccatccccctctttttctctatctctgtcttccgtcttttacttttcgttcttttccatctcacatgctcattttttcttctcaaaaccatccttcgaattccttcagtggtgtctcatctcccttttgctgcttctatcatgacctttgattttggtctctttttgtctctctctctctgagattctgaggctctgcctattccgtttttattctcatttgtttctaatttgtttccaagactctgtctactcccttttcattctcatttattactaatttatttctgaggctttacccactcacttttcattcccgtctaacctaatgtattatcagttcttccttaaagccttatattgcttctttaaattctcatttcagagaaacaatagtgtctttaattgattccttagaaataactttgttcatggtttttggctgcgttgtggtatataatctttccatttctcatctttgtaaatcatgttctgttcttttttatttcagcatcattttaaaggccccccactggctccaccctttttaagtagcattgttcctcatctttttggactagaattttgggcaaagctctggggaaaggggaagaagaaagtgccaaacaaacgggaagattgggtttcagtctgttatctctaggatgtttctcagctggacttggcctgtgggttatctggtccagcatagcaggatatcttccgggctcacaaggaggctgtgcattttacagaacattttaatgtgattatttcaccttgacttatcttcaccagacagctttgggcaaagacggccaggtagcttatatcttattgactcttccttctatcctataccatgattgaaacatgatgtaggcttccaaaaccaggccatgaaccttgatcttaactttctaagcatgggatagacacatttcctttcaatgtgtgccacccatccactttggataactatgagctgggtccactctgcctgagtcacacatagaaagacaccttctcttggagttcccaaatacctccatccacttctcatacacttggttatcttcctgcatctactgttatccagtgttataggggatctgtagcttcattcaagataacatttgtttgtttcttcttctcttgtttgctttggattggtttcataaaggaaatgagacaaaaatatatttatactaccatttgaaaagaaaagataaattccttctttcaaattcattcctttttctttctttccagtgaatctcatggggtgaggggagcactgaagggaatgtccaatctactcaagtccaaaaagtcacaggtataaggcacagaaaattttaccagtctaatgatggcagttttaatgctatataaggacagactatacaaaaatgctattaatgaggatgaggagctacaggaacaaacctgatgaggaactgtaattctattagagggatgtatatagccatcatttttttctttaatccaaaacaattagattgcttatatacacagccacattcaattctaaggtatttgattgaaatgcaccagaagatgcagatatatatatatacttttaccttagcttccattttattctttccctcccattttatcagtgctatagagtacatttttcccacttgagctcaacatgctgttgtgcagaaagccttctcttgggagttcccaaaatgttggcccagatgagtgcagcagacatttggcccaggtgagcctagcagatatttacatgaaatattagggagcatccatctgggccatgtgacttaggctggcgatacacgacagaggattccaatttgttgtataaatcacccttagagcccccaacagtgaacacatagggggttcttttcattttcatgatgtttaatataatctttaaaaataattaaaattaggtgaagtgtgtagatttctgagagattacagaaaggcattagttttgatacctcttgcttgtagcatttgaccgacataaacaaactaaaaggtttaaaaagaacagggattcttcccagtggtatagggcaatgggtagggaaaaaaagttcaaaattgataaatagaccaatattattctcaaaactcataccattgtgattgggaagaaatgaatacatattacttagtcacatcatgttaccatatacttatattaacacaacaaaaaggaaattatacgaaaaaaagtcatacatttaaaggatggaagaaaatcctaggtttactcagagctcaagatcccattgggatgaatattgttctttcctcggattgtgccttcatttcattcattcacttatgtatgtatttatttatttagagatgggatctatttctgtatttatttatttattgattgattgatggagtattgctctgttgcccaggctggagtatagtggcacaatcatagctcactgcagccttgaactcctgggcttaagtgatgctcctgcatcagcctcctgagtagctgggactgcaggtgtttgccaccatgccccgctaatttttaagtttttttttgtattgattgggtttccctatgtttcccatgctggcctttaacttttcagctcagcgatcttctgccctggcctcccaaagtgctgggattacaggtgtgtcccttcatttctaatgaaggaaggttttcctttgaatatctcacaacagatatttttaaaagaaaggcagatttgagcaaccatcaacaaggtttacttgaaaattaatctgatatttacaagtgcattatataacagaaatgttacagactgaattgtgccacacctaccccaaaactcttatgttgaaatcctaacacccagtacctggaatgtgattgtatttggagatgggtcattaaggagtaaattaaagtaaaatgaggtcacatgggtgggccctaatccaataggactggtgtccttataagaagaggagatgaggacacagatacacgcagagagatgaccctgtgaggatacagggagaagacaccatctacaagcccaggagagaggcctcaggaggcaccatccctgctgacaccttgatctcagacctctagcttctagaactgtaagaacaattgttgctgtttaagcattcccatatgtgggactttgttatggctgcctgagcagcctaatgggagtgcaaagactttctttaaataatgtataacaatgttggtttggaaatgactatccagtgttgagttcaaaactttatctttatgggtgctgctatgagtgagtgtctaatttgggggataatattgacattcttcgggagaaatgcagactccaatcagtgcagaaaatggcacagaataatgtttaaatatgccctccaggccataacatggttgggttaggaggaggaatattaaccattcccatcctaaaacacagaattttgggtttctttctgtgagttcaccacctctgaccttcacaggtaagggaccatcacacagacatctgccattttcatataactctctatccaaacaaaggctgaaaattcagcatggagaaactctcccagcacccgtggtcatccccttgacctgcatccccaccctgggcactggtgtgggggtgggattctttatgaacttgggccccaattctgctttccctggaaagctggacccacacaacatcaccctcatatgcagaccctcatgtgtgggcacctgtgaatacccagagctgggggtctgctctaggagctggttcaggacaggatactcccatccaatctgtgcccaccatagaaaagagccagccaagtgcctgctactacagggctcttcacacatggaaaagctgccctgtggaagtgtcccaggaaagggcagggggacaaaaaaaggtcgcagtgatttgcctccagacactggacactcttccctggagagtacagggcatgctgctctccaaacctgatcttgctacatttgtgctgcccacagtagtggtgccactgagttttcaaagaagacagcaggccctgaattgtgcaaggaaaataagtgcttgaattttgtagcatgcatgcagtgttctacttttaagaatggtaccaggctcctctgatattcaagaaaggcccccaacagctcagatggtagttttctaatcctgtcttcccatatgcacatttacctcctccacccaagaactgaataacagacatgagtgctcaggacgtcatgctgtctactgtcatccccttcctgagaccccctctccaaatctcttgacaaccctcttcttagctccctctttctttctggcctgttacactcaacctctccagcatcctaacaagtacccactcaaacctatttcctcccctgctgtgctgcttcttcaaaagtgctttgcttctcatcctcaccttctttccttgccctcttccctgcttccctcttcaaagcacttctcagctacaaatgagaaggaagcgatctgattaaacaggtgatgagcagagtcacattctgaggggatttgcatttttaaaaggagattaatgaccacatctgaaaatgccaccctggaatcttatgcagagtgacaggggattggggatgagctccattcagggcaggaagtgagagtttggatctgaagtgcttttcagatgctgaagtcataggaggttgcagttgcttcctgggtggagccataaacaaacatctcttctgctgagtgaagtctgagaagatagaggcaatggtgacccaggagctctggaattatctggctgtgttacacttgcaggactacacacatttaagtgtaaaaagcatgctttttgtccacttggctgacctcttagcctgctctcctcttattgttcccttgaaggcatcattttttaaagagaaatttaaactccgtccatctcatcccctttggaagaaagttaagattcctttctgagctctttcatcatctggagtttaaaagcttcccctcctctgtcaactctctttgaatccctcatgtcacaccaaacttcaaaagagacaaataattttgcatgactccctgcaggctccattttgccctgtagtgacagccccatgtcttgactttcctgattggaaaaacttctcaagctttctacattcatgatctctgcttcttcagtgcaaccttctccagtttgtccctgatgtccaatggtccctgcattaatcctgtccaagccacaggtgaccctcatatcatctcagcttctacttcccattcctctctctctctttttttttttctgagacaggggtgtcactctgttgcccaggttgatctcaaactgttgagctctaaagatcctccggcctcatcttcctgagtagctggtaggggtgtgagcccttctgcttggtctccagtcctttgcttttcttttttgacctatacaacatttggtagttgatgtccatgttcatgtaattgtcttctctggcttcttggggccacagtgcattgccttctccctcttttcatttattatcttttcatctagtaagacccatcatcccctaaagatgtatattttcttcaaagcaaggattggcgtaccttcacaaactgagtctccaatgacaacataaactgaaatgcaatataaatcatggacagatgtgagctcatcttctgcttcctgtgtcctccgctggttcttcttaccaacatcatgtattgttaaataagcgagtgatattaagttagagaatggactgagtccattaattcatttggcacgctccaaagtcctcacctgagatctatctactctccaaattacacttgttagaaatacaggaggggccgggcgcggtggctcacgcctgtaatcccagcactttgggaggccgaggcgggcggatcacgaggtcaggagatcgagaccatcccggctaaaacggtgaaaccccgtctctactaaaaatacaaaaaattagccgggcgtagtggcgggcgcctgtagtcccagctacttgggaggctgaggcaggagaatggcgtgaacccgggaggcggagcttgcagtgagccgagatcccgccactgcactccagcctgggcgacagagcgagactccgtctcaaaaaaaaaaaaaaaaaaaaaaaaagaaatacaggaggatccttttcacatgagctaattagggtgaatacatgtaagtgttggtaagaagtactagaaacactggaatttgtgagatttcactgaagaaccagcttccacccagtccttcacattgttctcttttggtagtttcttgtcatttcctccttttattatcaatagagctgctgtgaacatgcatgtacaagtttctgggtggacatatgttttcatttttattggggggggtagacatcaaagaatagaattgctgtgttgtatgatgagtctgtgttctaacatttcagaagctggacttcaactgcttcctgatttcaccttccacaccatttctgtagtgaggcccactccttggccttataagacctgaattaagttaggtgcccagagccgttctgtcatcgactctgttctttcccttgctagcctgtgtaataattggcaatcagacctttacatgagcaatggtttcatatgtctccccaactatattacaagttccacaggggcagggctatgtctatctccttgacctctgtatctgcgatgcctggcagagggctatgaacactggttacgctccataaacactgggagacaaagaagggtgtcagtagagttagtttttttgcttttttacccccagaactcttagaaaataatttgagctattccttcaaggaagtcctggggcaggtgatcattcatagatgacatgagggagtgcacagcacatgagtttgcaggaaaatgcaaaccccacgttgaaatttgatccccaatgttggagatgaggatttacaggggggtgtttgggtcatgggggcggatccctcacgaatggcttggtgctgccctcatggtaatgagtgcgttctcttttcagtcctgcaagagctgattgttagaaagagcctggcaccttcctctcctctttctcttgcttcttctctcaccatgtcatctgtgcacacagcagctccacttcccattccaccatgagtggaagctccctgaggcctcaccagaagcatatgctggtgcaatgcttcttgtatagcctgcagaactgtgagccaaataaacctcttttctttataaattatccagcctcactcaggtattcctttatagcaatgcaaaactgactgagacagggtatcaggagacctagctttgcctgaatctgagaacttcatcaggacttttggaacaatttagcccacaggtccaaggctgatttttgtcacagtgaagttcaggtagtaagaattctcactggtggctgttgaggatggtggtggtggggatgggtcatatggagaattagcagtgggagactagaaattaaagtggagaaagggaagaattaaaagtcaaaaacagtgtgagggaggaaagcaatggatataacacctcaaatctttatccttgagaggccttaaaaaatctacttaataataatcagatgctattctataagtactttgagactagacatgtgatgacttttaggaacctgtactgtggctgaaaatgcatgcaaatctagttgactcagatccagtcttaactggctcataacttgcttcatatgcatgactgtacgttagcaaggaaatgagagagaataacagcacatcacataggcatgaaaagtatttgcaaagcagcagttctcaaaaatgacattttgcagtgttttccagaagcagattcagaaaactgaagaccaaagtaatgatggagccgtctcatgcctagatgagcagaagcataccaaaggcttagtatttccccaagtagtaggcacctcaaacttatttaaggaaaatactcttcttgatgaaacagatactgcagtcgaagcaggaatgtgtttggtgtgctgccttaaatagcatgggtagatgttcaaacatgttaggactcgctggccctaggaaagacccgcaagtagatactttccacaccaggaaagtgacaatgaaacaccaaacaccttttctcctctaattaccaaggaaaatatttctttcccaatggtggaagacaataatgttgggaatgatgaagttttctggagtgtgaagtggatatgtcttataagtttaatccacagattcaccacttcataagtggataatcgaattgtgcctcagtttcctcagacttggggatattaagagaaccctcagtcaccacaaggtgggtaccagcataagaaaagagtgtagcaaaagcccaggggtgcatgttcttaaagtgcctagtgtgggattagaatgacaagtggtagatgacctacttgtgcagaaatttagagttattttgtgattttcaaatgatcatgggtgctttccatatgctgtccagactaggggtgctgcagctagaaagggaagaaggtttccatatttcctgagattggagtcacatcctctcaccaatgcactcacctgctgactaaccagtgtacttctgggaattgcaaatgcatgaaatggcacccattctagactagtcgcggcagtgttggtgatggccacagaccaggaacgaccttgacgtttatccgtagggaactgggtcatgagccatgatccacatcatggatactgtgcagctgtggcaatgaatgaggtatccttctgtctgtgcaccgggaaaggtttccaagatacactgcacagtgagaaaaacaagaagcagaacaatgcacggtgtgctacctcttgcattacaaaggaggaaatgtaaaattaatttacaaatggccaataaacacatgaaaagatgctcaacatcactaatcattaggaaaataaaaatcacaactacagtgggataccaccttacatcctttacgatggttgttcccaataaaaaaaaaaaaaggaaaacagaaaagaaaagtgttggcgaggaggaattggaatgcttgtgtagtgtttgtgggtttgtaatatggcacaacaactgtggtcatttctcaaaaaattaatcatagacttaccacaagatgcagcaattcggcttctggtgtattccaaaaagaacggaaagcaggggccccagcagatatttgcatgtctttgttcatagcagcattattcacaatagctaaaagttggaaacaagcccagtgtccatccatccatgaatgaataaacaaaaagtggtctatgcgtacaaacaaatgggattcagctgtaacaagaagggtgattctgatgtgtgcttcaacatgattaagccttgagttctttctgctaagtgaaataatcagactcaaaaagacaactactacatgattccacttaacagaggtgcgtaacgtcatgaaatgcataggcagaaaatgaaaaggtggttgtcagcggctggagggagggggaaagaggagttggtgtttaatgggtacagaattccagttggggaatatgaaaaagttctgggtggggatggacagtggtggtggttgaacaacaacctaaatgtacttcctgccactggatgtacacttaaaagtggttaaaatgggccgagcgaggtggcttgcgtctaatcccagcactttgggaggtcgaggtgggcagatcatgaggtcaggagattgagaccatcctggctaacatgatgaaatctccgctctactaaaaatacaaaaaattagctgggcatggtggcatgcacctgtagtcccagctactcaggaggctgaagcaggagaagtggttgaacccgggaggtgaagtttgcagtgagctgagatcatgccattgcattccagcctgggtgacagaagaggaacccttctcaaaaaaaaaaaaaaaaaagacagaaaaaaaagaaaggaaaaaaatggttaaaatggtgaattctatgttatatatatttcacaataatttacaataattcctattgttttgcataaaacagctgtagaaagctttgcaggtcatgaacagcacagctggccactggggctggcgtggggctaggacctgggtgcatagggaacagggatgagacacaggctcttcatgcctgcacacatatacagatacacacagatggaaattactgagccatctaaatacaacacctattcaaaaaatcaaacagaaaaaggaaatgtaatggggctgaaggatgagggtaggtggggtggctgctcaggaggactgtggaggccacatcgcctaaccttcgaggcctctcttagcagctggagtgcatcccggggacttgggagctctggaaagaggagcaggaaagggccatggccggaggaggcctgaaaaagatcatctctgccacagagaagaagctggctcggatgctgctggcccctatggagacagggagacccggggagacaactgtattcattcaaggaggaatgggtggtgatgcaaacttgggtggaggccacagggtgcagaagacaggacacagcagagagagatgtaggacatggaagggacagaaaggagtgaccacaggacataaaggggcaaggaaagtggaagcatgataacatctgctgggcatccggctgaggggttgggtgcctagggtgcccttccctaagggagaaccccaggagcagattcagagaaaaccgcccagctcactccagcaagaatcagaaaaggaccggttaaaggagagggtaggaaggtcaccaagctccaagggccctcatgaatccggcttggaggccacagggcccagggcaaggacaaaccacaggcacaggacagctccggtcaagatcttctggctactgcaggaggcagaaaccacaccctgcaccctgcactgctgaggctggcgctggagtccagaagcttctacaccagaagcttcggtcccccatccctgctcaaaaaattaaaacaaaaacaataacaaatcggtgtcatgcaccctctgcttcctggtgctgttcgggaccctgagtctttcacgggagcacctgatggggaaagcctggacccgtgtcggtgtccctcctgcaaggagtgctgggaaaatgaactttccagcttcctccttgcgaaggcagaacattccccatgtgtactggtggcatttaaaaactgcagggcagccagagaacatggactgtgttccaccgggagagttcctggcgggatgtcccggtgcagaagcccgtcccaaggtgggtatttgagctgaggaactgagaagccggtttctgcctagagttagagatccgagaggcatcagcacatggaagggagggaatctacgatgcctcgagggtgggagatcagatgaaccaggagaggcagggcccgggaggaaccccggggagcagcctcctttaaagcctgggggaagtagcttcagagaaggtggggtaggttgggtgggggttgctggaaaaatataattaagaaacaaatttctgctcagcccagaaacccccctcacatccatagaagtaaaagaaacttgtcttatgattgagtaagcattaagccaaaatgtgatgcaatctgctaagagatgacaaagacagaaagaaatcccacctttgtatccagccaagcaggtgcaacccgttacacacatggtctccagatagatggtgactagttcccagttgagaggactcaacggcaccatttgtcacacgtagttcatcctaaattcacccagtaactgtgttgattctctgtgtggttaattggctttatccacaggaaaaagaaacctctcatctatgacaggaggtagttttgcaactgggagtgagatgcccccagaactgaggttccttccttctcacagaaactgggagacaggggtgctttctgcccggatgcctgcctttcaaagagaggtctcctatggccttgaggaggagaattctgggttgtgaggcaggcaagatacttatgtatgctttagaaagctttgcatacatcttcaagggatagagaaagagttttcaattacacctcttctaaaaaaaatgatctcaaagtccagcctaggcaacacagcaagatcctatctccacacacacaacaataataataaatttgctggacatggtggggtgtgcgtgtagtcccagctactcaggaggctaaggagggaggatcacctgagcccaggatgttaaggctgcagtaagcttagatggcagcactgcactccagcctgggtgacagagtgagactctgtcaatgaatgaatgaatgaataaatgaatgaatagaaaatgctctgagtgaaaagaggagagtctctttatctttttgcaacaggctaaacaaagtttttaaaaatgtatatttgcctcacagagattattccaggaaaagaagtggccctcagtgtcaaaggatgcaaaactaacctctgagttcctggcaggtttagcaataaaggaggatgttgctgatctcagtacaagcaatgttagagaaaggggaagatggaagtggacaaggacgagtgagtggaaggtgacaaatggaagcaaagaaacgtatccagaccattgaagatgcttgagcgagaagaaagaggcggtggagggaatggaagcccgaggaagtcatatgttgcaataaggggcctcagagcacgtgtagagtgtggagcagagcccttgcagaggggctgtggaaggctggcagggtgcaggtggccccactctccgtcaccctgaggagtgtgtggtcagagttaaagctcagtctgtttctgggatcaggtaagaggtgagcgtccggagaagacaggcggatcttcagatcctgcagacctccaccgtgccctctgtccctctcgactgctttttctccatctccattgtctggctcacattggtgtcactttttcatttctccctgcccgtcttttctcttttctcctctctttttcttaacccttgtacctttggaagtcccactaacagaatttaaacagcttttcaagttggttttttgttcccagaaattgattttagactctccatgaataatgtggaaatcaaatgagtataagctggttcatctctctgcaaataaacaaataaaatctacattccaatgtttcttcttccagagtagcccgcacttgattttttttttaattactgtcacttgcaatagatttttaattcctgtaacctggctacacaaataccatggggcaaaagccttacttcctgtgagaggaaaccaggcttgactagcctcatgctggctttgaagaagtaaaatcaggggttgatgaatttgcatagggtaaatatcaaaggtcaaaagtaaacaataggtggtagagggaataccccaaattataaaagaacaaactgtttaagccacaacagaattatcgtagaaataaaccacggtccttcctgctaaaatattccacttagaattgtaaaatattcttctcaataactcctggaagagcctactcataaattaatgaggctgggagcagtggctcacacctctaattccagcactttgggaggcctagacgggcagatcgcttgaggttaggagtttgagaccagcctggccaatatggtgaaaccccgtctctactaaaaatacaaaaattacccaggcatcgtggcaggcacctgtaatcccagctacttgggaggctgaggcaggagaatcgcttgaacccaggaggtggaggttgcagtgagccaagatggcaccactgcactccatcctggatgacagagtgaaactccatctcaaccaaaaaaaaaaaaaaaaagaaattaatgaatgtaagagcatctatgttccaaatgcagtgtattattttatgcaggctttcacaagctccaaaagattcaccgtgcagaactggacgttctagagaaagaccacgcctcctcctgcaggtaactcttcattcaggaagcagctcttggcttatccctgggcttagtggaattggaatacctgaccataggacaccaagggctttaggacctgagtggcacatcgtgtcctggtgacatctgagttacctggggcgtgcacagcagcctccagcatcccagggagagctgtgtatggggtcaggctcaagcaggtcccagggcaccagtgacccaatgggtgaatcagactcccgtggcacctgctccttctgtatctccctctgccatatatatgagctcatgggaagcactgtaacctcttacagaggaggaaagttcatggacttctagcttctagaactgtgatacaataaactcctgttgcttatctactcctctgcagtattttgtcatggcagccctagcaaactactacagggactgtgggggttaggatgacaccaagcatcaaatgccactccctgttccattattatgtaatgtccctctttgtcttttttaactgctgttgctttaaagttagtttttttgatataagaatagttactcctgctcacttttgtggccatttgcatggggtgtctttttctacccttttaccttaagttcatgtgacactttatggttaggggagtctcttgagggcagcagatacttgcttggtgaactattatcaattctgcaattctgtgtcttttaagtggagcatttaggccacttacattcaatgttagtattgagatgtgaggtactgttccattcatcctgctatttgttgcctgaataccttggttttattcatttatttattgtatttgtgttttatacgtcctgtgagattcatgctcaaagaggttctgttttgatgtgtatccaggacttgcttcaagatttggagctccttttagcagttattgtagtgctggcttggtagtggcaaattctctgagcatttgtttgtctgaaaaagactgttatctttcctttatttatgaactttagttttgctggatacaaaattcttggctgataattttttttttttttttctgagatggagtcttgttccgtcacccaggctggagtgcagtggtgcgatctgggctcattgcaaccttcgcctcctggattcacgccattctcctgcctcagcctcccgagtagctgggactacaggcgcctgccaccaggcccggctaattttttttgtatttttagtagagacagggtttcaccatgttagccaggatggtcttgatctcctgaccttgtgatccacccgtcttggcctcccaaagtgctgggactacaagtgtgagccaccgtgcctggcctgataatttttttttaaggaggctgcaggtgggtatgcatgctcatttgaggtgttcttcccttattgaagattactaaaatcacatgtgttgaaaagcatttggtattatttacttaattgatgagtacccatttatttttacattaatttgataccatgtataaacaatatataaacataggtatggacatatacatatgtgatatgtgatacagcatagaacatatacttgtgcacataaagatagagggagacagaaatacttcagatttttgattttaaaactttatgcatgaacacataaaactcactgttaaaaaaaatagctggatttaagttgtgcttttgtaaatagaaaaagttaacatttatctgaggaagcccttgctgagttttagagaaagtaggtagtaaatttacatctcaaagcacacacaaacacacacacacacacacacacacacacagagagaaggagtttgggtgtgttcaaggaagattaaaagtagatgccaaggtaacacaaaaatgatagaaatttataacaggattttataaggagaccaattttatttccatacatagcttttattttggtctctgttttccaactttactccaggaaacacactacacaggctcccttcttaagtgctggtgggccactgcacatgcagacagcccactttaagggaagaatcaggggagaagagatgcagaccccagaattatgccaacatacaaaagcctaagtcaaaggtcaaaccacacacttgaaatctcatcacctgtttggccctgttttaagtgtgctttactttctttaatttctgctctaaagcttttaaataaactttcactcctgctctaaaatttgcctaagtctcttcttctgccttatgacacttagttgaattctttcttctgaagaagcaagaattgaggctgctacagacttgtacagatttgctgccattaatatagtttagtgccattctacatgatagaatatatatattcttatatttatatatatatatatatataaaatttatgtattcatagaggccttgaatctacattcttgctgcactttatgtaaacaatccaggtataagactaaaacttattttggaaatatattggtcccatatgatttctatttcataaaaatgggagacaggagggggaaaattatttttcagaaggaaacaacagaaaaatggttattacattttagatctgttcattttttttaaattttgttatttacctacaatttggactgaatcctaaattttttcctggctacaaatttcaaaactaatggtttcagaattttcttccatttttcttccattttggtatattataaattaaaactgtgctttttaaatttttatctttttttaattacacttttaagttctgggatacatgtgcagaacctgcaggtttgttacataggtatacatgtgtcatggtgttttgctgcacccattaacccatcatctaccttaggtatttctcctaatgctatccctcccctagtcccccacccctcaacaggccccagtgtgtgatattcccctccctgtgtccatgtgttctcattgttcaactcccacttttgagtgagaacatgcggtgtttggttttctgttcctgtgttagtttgctgagaatggtggtttccagcttcatccatgtccctgcaaagatatgaactcatccctttttatgcctgtattgaattccatggtgtatatgtaccacattttctttatccagtctatcattgataggcatttgggttggttccaagtctttgctattgtgaatagtgccacaataaacatatgtgtgcatgtgtctttatggtagaatgatctataatcctttgggtatatacccagtaatgggattactgggtcaaatgatatttcttgttctagatccttgaggaatcgccacactgtctttcacaatggttgaactaatttacactcccacgaacggtgtaaaagcattcctatttctccacatcctctctagcatctgttgtttcctgaccttataatgatcaccattctaactggcatgagatggtatctcactgtggttttgatttgcatttctctaatgaccaatgatgatgagctttttttcctatgtttgttgctcacataaatgtcttattttgagaagtatctgttcatctgcttcacccatttttgattggcttatttgttttttttcttgtatatttgtttaagtttcttgtagattctggatattagccttttgtcagatggatagattaaaacttgcaagctgaaactcgacgacttatgtaaacttctggataaatcatagcaacttatatataaacaacctttgtgcctgctgatgtgtggactacacaaaaggtacacatgaacactgtattcagactgcaattcagaaaaatgtgtcacattgccattgcaattggaagatgcttcagaaactctagaaaacctagtctatagggttagagtgatgtttgccaaacgaattgctctaattgaagcagctgttgtgtgactttaataaggttccaggattatactgtcccttttttgctgtgacttccctttgcccttttctgatttgtcttcatccccttttccatggggcatgacttcttaagaatgagccttcctagtgatgtaggatgagatgaaacatacagtcacaaagtcatgtcttctatgatgctttatctgaaagcttttgaagaattggggggccaggtgtgctggcagaggcctgtaatcccagcagtttgagactctaaggcaggaggatcacttgaaaccaggagtttaagaccagcctgagctacaaagggagaccacgtctctacaaaacataaaacaaatcaaattagccaggtgcagtggtgcatgcctatagtctcagatacttgggaggctaaggtgggaggactgcttcagcccaggagttcaaggctgcagtgagtacactccagtcttggtgacagagcaaggttgtgtctctaaaagaagaaaaaaaaaaaaaaaaaggaaaggaaaggaacggggtaaacaggaaagccaaagatctcgggcatctccagatgattccctgaacaaattgttttttcttggcttcaaaacctttcaagatgtatatttctttgtaaaagaaggacatgccaattgtaactttaagtgagcaatccaaatccagctcctaaaaccgaagtattttaactctcattctgataatatttattttctgaggcaaagaagaaagacaagattagatcaattgtttctctgcccactccatctcttccaacctgccttctcccctttaatcaaatgtataaatactaagcctcctgaaacctcttcagagaaaacacaaaccacagaggttttttgcaactcatgtattcccagggtgcactatcaggctctggctcaataaaactcaactggtcaagactcttgcctcagtcagtcattctggataaccaccaggagtcctgcaaagcccttcagtaatctattgcctgcctaggtgatgtgtacctagatgagtcatatcttcatgagccaaacacttgtcttccttttctgtctttcccaaccctaccactcagtgctgtgtgctctgatctgaccccagttcccaggttgtttgtataggtctaagaaagcaagaccaggaggggcaggttgagaaggaagtaagaggccaacagcagtggaaagtggcaggtagagctgtcattgctcaaagccacacacactgggtgcattgtatgaatttttctggattcaaaatcttttccctgtgtgtctatctagaaactcaccctcctcctactttcttctcattacattttctgtttctagtgcacttgtttatgtccagagaatggccatgcaaatagttgacaatagaataaacaatgacgttttgtgagacttggtagctggcctttgttttttccaaaagagattgaggtttctaaaagctagcttttatgcagggctgtgcagttgtgagtgtagttttatggaacaggtgcataagtgaagggtgagatagaaaacaaaatgctggctgtttgtcaaatcctgaaagtgaatgggacaaaaatcatttttgaagaaggatgtcattcaggagaccttgtaaatcttagagtgtcctcttatcagatgaagtggaggatgaggttgaattatggagttaggtgacagtgggtacatacttctctgcctcagttttttttttttttttaatctgtaaaaatggggattgtggtacttgggattttttggtgaggaccgtagttaactggaaagctctcaggatagtgcctggtacatagtgaatgctgcatcagtgtgagctattataattatgggaatagacaaaggtgccaccctggccatccagagtggggagatattttctggtcagagtccaggcaggccagctggagatgaagctgattagtggggacgcttaacttccaggagtggaagaatttaggaggagtaaacagaatgcacaacattctgtaaacattcctttacccaacagtaggaatactcagagtgggtgtgtcttccgtgacaatcattatctcctgggaatctaaaaatgtgtcctagagtcaaatggctttgatgtaagccaaacccagaaatgggcttcagggctgcctggcacatagcattcattcatcttgaaaaaggaaagcattcatcttgctaaaggaatccccttttctggcccaggccattatttttgttttagtactatcctaatttttaaggtataaggagaaagactgaagaataaaataataaagtacgtgtatgaaataacagggtagaattgagactggtacgtgtaagttaagagaaattgtgtataaattttgtgtgaacagaaaaaggatttcttgttgcaaacagacctctccatataaataatacctattgcctcgagtggatagcagaccgcatcacaagaacattccagcagagtcatgagagaatggttagtgtggcttctttaattggcaggttagactgagtaagttactgaagagaaaggagttgaaggagaagatgggtgcgggcaagaaaaatgggaaggtgaaaggaaaggactgaaaggaatgtttaccaagggctcatcaggtaccaggctctgtgactaatgtcttacacatgttaatttactcttccactgtcattttctgatgcagtaagagtcagccttacactgcagatgaggaaagaggctgagggaggtcaaatgagtggcacagggtcatccagccacttcatagcagagctagtgtgtttcactgtggtttgtgccgacagaaaagtgagacatggaaggaaggcaaaacatttttgttgtgggtgatgtttatgaaagtgacccttatgaggcagaataatggcctcttaaacatgtccacatccgggctggatgcaggggctcacgcctgtcatcccagcactttgggaggctgatacgggtggatcacgaggtcaggagttcgagaccagcctggccgacatggtgaaaccccgtttctactaaaaatgcaaaaattagctgggcgtgggggcgcatgcctgtaatgccagctacttgggaggctgaggcaggagaatcatttgaacctgggaggcggagattgcagtgagcctagattgtcccactgcactccagccagggcaacatgagtgaaactctgtctcaaaaaaaaaaaaaaaaaaaaaaatctacatcctaactcttggaacacatgcatttacttttcttggcaaaaacactgttcaaaggtgatgaagttgagtatcttgagaaggaaagcttattctggcttatctgggtggctcccagtttcatcataagggtccttgtaagtgaaagagcaaggcaggaggctcagggtgagaatgatgcagtctgagagactccactggccattgcttcctgtgaacatgtgtgataagacaaaattataactaatttagttatagatgtaattggcttttatttgtgatttatgatttggggcagctctccctctacagatgcctcagcatcccaagtagctgggactatattgcgggatctggcctgcagcctgcaatgcaatggggctctttctttgttctcaggcagatcggcaggttgagaaataaaagacacacacaagatagtgaaagctgggtccagaggggtcaccgccttctggtcctgcgatgctgccaatgcactggatataccagcatttattattaagtttagtgagagtgggggtaggttagtgagagatttagggccatttataggctctccacaagggtcgcattccattcccagagctatggacatctgcttttctgggataggaatcttggtaatgtgaaacctccctgactgcatgtccgttcataggctctctgcagggggaagcacatcacgtgctgttggctcattctggcagtccaacctggcatttgtctttacacaatcctgcatgcaatttcgtatttacaataatcaggagcatttcatcttttattccatagcaatagtttcagggggtctccctacatctcccccttttctccaatttaaatgaaccatagcaatcatagcttggcactgatcacgattggattgaagaatatttttttccaattttacacatgaacaataaaccaatagcacaaattatacacagaacaaaattaacgatagtggatcctcccaaagattttacctattgaatggggttgagattagataacccctcagagatactgtctaaaacttcagcactgggtaaagcagttaagtgtgcttgagaagcttcaaaaatctgttcttttagcttgcttaagtctaaacttaaattatcttcacttccttgtaaatggcattttactgattcccagttgtgaacagactcattatgttggaatggagttatacaaaaatcagaagtattccaatcaggttgcatttgtaatctatgttctaaactcataattctatctcccatccatgtaacagaagcacatcatgtgctgtaggctcattctggcagcccaacctggcattgtatttacacaatcctgcatgctcttttatatttacaataatcaggagcatttcatcatttgttctgtagcaatagtttcagggcttctccctacaggactacaggtgcgcgccaccatgcccggctaatttttgtatttttagtagagacagggtttcaccatattgaccaggctgatctcgaactcctgaccttgtgatctgcctgccttggcctcccaaagttctgggattacagatgtgagccactgtgcctcgccaataattaacacatttctttgagtttttgtaattccagcacaagagaaaccatttgatatttgaagaatggctgcacaccagtgaaaacatctgtagattgcaccacacgagggagactaccagtatgactatcaggaggaaaatatcaagagtttggaatatgcaccttaggcaagatgcaaaccaactacaataggatagatcaaagaagaagccagaagagtctagtcattttaactaggcagcacatttaatgatttttacaactgagtctgtaatacccaatgtatttatccatgtgcaacaagaagcgtcagaaactgcacaggctcccctctgttcagctgatagagagcaattctattatctagcattgcatgtctatgttaaattaaaacagggagcgagaataggcaagtatagaagtggaagcctaaaaaaaactccatacatttgaggaaaacattgtgttacagatgcagctaatgtcagcctttgggtggactaaaggatctcttggtatgtaaaaatgtgtgggccaggtgcggtggctcacgcctgtaatcccagcattttgggaggctgaggcatgtgggtcccctgaggtcgggagttcaagaccagcctgaccaacatggagaaaccccgtctctactgaaaatacaaaattagctgggtgtggtcatgcatgcctgtaatcccagctactcaggaggctgaagcaggagaatcacttgaacccaggaggtggaggttgcagtgacccaagaatgtgccattgcactccagcatgggcaacaagagcgaaactccatcttataaaataaaagtgtggttgacatgatatatctgacactgttaacttactctcagaagctacttcttgtgaaatcctaagtacagcattattctgggaagcaaaggcgacaggcataagcaaggacaaattaagagaggtaagattcccatcatgattgatagtcttgttctgacatcttgagaaaactgtccacagtgtaaagtcatcaacttgttgtcttggtttgcagtttgagtgtctctaagttatggtgttgaacatttggtgagttcttagcggcccacacctcagacatgagagttttctcatgaaatttacattgagttgtccatctccagcttatatggcttcaggaacagagccactcttgttcttaattatttcattggagaaaattgaattggaagaactaaaagaattcagggtccagtccagtctaccagtggattataaatactcaaagataatgaacagtggttcaatctggtaacaggtgtactacagttctgcttttcaacatagtttttctgtctataggagtctctatttttaccaaagataattccagtaggatgaatttgtttgcaaaataggttgagtctcaccgaacttgcccagactttttacctaagtgcggcaagagtagcaatggaccatagaggctctttttaaacttcgctttgctagaagtttttaataagaatctcagattaaacttccaaaaacctcttgagactaggaagccaaaccaagggcaacttcagactttgcctgcattccctatgggtttattctatgtatattctcaaatataacatcccagtcaaagccttggtaatataaccgatgttttcaaatgtgtcctgttataaagagagcagatccttactgaagttgtgcaaataactttattaccataaacatatgaatactcatgaatagtttcccaattctggggcactcagcaaaagcaaatgtttcaatttttgtttacaaaagtatactttaccaattgttcaaggaaaaaagttcataaatctggagaataaaacattcaaagactcagcacattttcaaatagaaaattatgaaaacattatccttttgattatttattccaataaaattgagttttttttcttctttgtcttgaatttcatgaaggtatcagcctgttcattaaaattttgaaagttcttagtccagtggtatgatcttgaagttatcaggagcttgtattccagagtccttgtcagagtcttttccataaatctccttgaagaaaaagcaattttggactgtagctgatggtaaatactttgaggaagaatcaaagcaactgtctgggaatgacaaagatttaaaatgactatggttaaaaatctaatgagaatttattatggtaaagacacagctcacatagaaatctagttacttctgtggcataagacactatgataacatatttgatttccagaaatttcatataatttttataatactcattaaaaaaattttttttgagatggagtgtcactctctcacccaggctggagtgcagtggtgcgatctcagttcactgcaagctccgcctcctgggtccatgccattctcctgcctcagcctcctgagtagctggggctacaggtgcctgccaccacacctggctaattttgtttttgcatttttagtagagatggggtttcaccgtgttagccaggatggtctcgatctcctgacctcgtgatctgcccacctcggcctctgaaattgctgggattacaggcgtgagacatcacgcccagcctagaatactcatattattaacattcccataaatattatttagagaaggtttagcatcaattatcccttatttgaaaatgctttctataaatttaatatataaaataaggtggattttccgttcagcttctgtttctcaagaggattactgagttgttggtgtagcccattcataaataggaccaaaaaagtatagtcttatgtatgttgaaaaaggtccttaggtaattccagtacttccagcagaaaatcattgatttagttttaagttctacctattacaataagagttctccatccttgttacatgttagtagtgtcagggaagacttaaaaattaccaatgcctgggtccgtctccagacctttaaactggaactaatgggtggggcttgagcatccacttttaaaaatgttttccagtgattccaatgtgtagctctatttcccatcagatttctctgatttcttgtggcattcaattttttctattttggtatcatgattattttcaggtctcatttcctgtcttaggctttatgtctcctggcgtagggaccttgccttcttcatttctgtatcttttttaaacacatgaactggtcatcaggaaaaggtctcaaccacacataggttgtgtcctgagtctcaggttcacatgttaatcctaaagtctttgttctccacgaggtcagatgttgcttgtgatgaagggtgtggttaagtctgcagtgcagatggtggaagggatttcactgtttttagacatagcattggaactaagaattttatgtctatatgggtgaaggggcagggatgtgtaggaagacagttctaattaggatgaaggaattatactaggaagtagaggtaaaggaagtgagaaggcttagtaaatagaagaaatgtgaacttatcaaagtggctagagtagaccactggagattcttgattaagtgaattaactagattttagaaaggtaatgaggcagtcatatgcaaggaagatttcaaagtctggagacaagaagtcaagcaatactttgagaagtggttgagctttatgggaattgagagaattacagtattgagagatgttaaaagtaacgaagagggtttcatcatgtgaaattgtgtttctcatttgaatctgagaaacaaatgagcagaggctggagataattatgtctaaaagacagtggggtacagggagcataaaggccagggagaaagggaactgtaggaattagtgctgagaagcaggagtttagtggaggaaggaggagatgcagtcccagatacaagcaaataagtcttttccctctcccaagcatggcagtcagccctgcaggaaccaggataagagaaaaggccatcatacctgccagtcttcctgaaatacagaaatgacatcaccgctgctctattggagtaaagaaaggaagacgtcctattcctggaggagctgtcatggaaagaaaagaaaagaaggaatgaagatgatgttattttacatgggggagcttgaggaacaggcatgtagcatgaggtactctataattgtttcttcaaggactacattatttctgttggaaaattgatgggagatgattatattcttgcagttttttttccctcttaccatacttctaggttggtgatcagtcctctgtcaattctctactgcactcagatattttggaaggctttcagatgtgagaaaggctgattgctattttctatgtcattagaacttgccacctttgcacctttccatggttgcatctttttctcagtgtctctgttatggcagtcacgaatgagaccctgccaggtctccatggcaggcacctgatttacagaaggcccagatcagtacatttcaaattcaccacctcctttgcacagaaagcttctttcctacaggctcccaggaagggtgtgaaagcaagcctagttctctgaggatctctttaactccaatgggtgactggttggaggattccccatcagccttgcaaaaactcttagaattgcattggtacctaaaacttatttctctttccttttcacaggaatcagccctggatagtggtctgtgggttctcccatactaccttcatgcctgccccacattccctcagaggtgtcttccctgataaattatcttgtatgtctaatcccatcttggatgcatctcaattggtaaaaactaacataccaggcttgattctttgcacttagctttttttctttctctcccacaagtagtcagtagccatgttctagtgttctatgtgttacctctttttccatatgtatggaaaaaggaaggtactgttgaggtgcacttcctatgtgccaggccctgtgctcaatactttacctgtatctcatttaagccacacaataaccctgtcaggtagacattatttccattttggcaatgaaaagacagaagcttagcgtggtgtaaaatctttcctggtgtcatatggctagtgacaggtggatctgagatttgattctaggactatttgacctcaaggctaatgataatggtagtaatatggtagctgacattggttcctctgtgtgtggcatcttgtttcattgactgtattaaacctttaaaagaattgtatgaagaaagtagcctcattgcagttttcaggtgaggaatcagaggttcagagaagttgagtcttgtgcaagaaatttataactgtaaactcttacattaaaaaagaagaaagagctcaggtcaacaacctactttaatacttcaggatatgaaagaagaacaaactaaacccaagcacagtgaatgagggaaataataaggattagagtggatataaataaaatggagaatggaaaaataatagaggaaattactgaaaccaaaagttgattcttcaaaataaaatcaacaaaattgacaaccattaactagattgactaagaaaaaaagagaaaagtttaaaattactaaaatcagaaatgaaaatggactctgagcatggtgggtcgtgttttaatcctagcactttgggaggtcacagcggaaggatttcttgagaccaagtgtttgggccagcatagttaaccctgggagatgctgtctctacaaaaaataaaaaaccaattagctgggcatggtgacatgcacctgtagtcctagcatcttgggaggctgaagaaggagaattgcttgagcccaggaggttgaggctgcagtgagccatagacacaccactgtattccatcctagggtggcctacagagtgagagcctgtccctctctcttcaaaaaaaaaaaaaaaaaaaaaaaaagaaaaatgaagcgattactaccaattctaataaaataatgattatgaaagtagtataaataattgtatgctaataaattggataacctatatgaagtagacaaactcttagaaacacacaaatatatgaatagaactataatcagtaataagattgaatcaataaaagtaattgatgaaattcagtattttttcataataaaaacattctaagaatggaaggaaaccacctcaacataaaggcaatatgtgaaaaacccaatgctaacatcatactcaatagagaaagactgaaagctttccctgtatgagcaggaagaagacaaggatgcctgcttttgacacttttattcaatataatattgaaaggtctagtcagaaaaattaggcaagaattttaaaaaagacattcaaattggaaggaaggagtaaaattatttctgtttacagataacttgaacttatatgtagaaaatcctaaagatggaacaaatctattaggactaataaataaattcagtaatgttgcacaatacaaaatcaacattcaaacatcagttgtatttcaatacactaaccatgaacaatctgaagggaaattaagaaaaaaaaattcaatttctattaacatcaaaaagaataaaatatttaggaataagtttaaccaaagaggtgaaatgattatacccgaaatctacaaaatattgctgaaagaaatgaaagaagacatcaataaattgaaagacattttgttttcatgaattggaagactcaatttggttaggaggacagtgctacccaaagtgagctgcagattcaatacaattcttatcagaatctcagtgacatttttgcagaaaaagaaaaatctgtcctaaaatttatattgcatctcatgactctaaatagacacacagctttgaagaggaagaatgaagctggaggactcacacttcctgatttcagcatttactacaaagccccagtaatcaatacagtgtggtactggcataaaggaggacatagaaattaatgaaatataataacctagaaagaaatgcttgcatatatggccaaatgattttcatcgagtgtgccaagatcgttcaatggggaagggacagtgttctcaccaaatgatattggaaaagctggatatccaagggcaagaagagtggaacctttacctaacaccatgtgcaaaaattaacccacaatacatgaaagatctaaatgtaagagcaaaaactatacaactcttagaagaaaaggtccatgatactggatttcacaatgatttcttggttgtaacaacaaaagcataggcaacaaataaaattgataaattggacttcacaaaaatcaaaaccttttgtatatcgaagaacattatcaggaaggtaaaaaggcaacccatgaaatgataaaaatatttgcaaattatatgtgtgataagaaattaatttccagaatacatgaaaagctacaagtcaacaacagcagacatccaaaaacccaattaaaaaatgaacaaaggattaaaatggagttttctccaaggaagatatacaaatatccaataagcccatgcaaagttcctcagcatcatgaatagttagagatatgcaaatcaaaaccacaatgttacaccacctcacacacttgatgggaatgggaaatgttatagccactgtaaaaagtggtgtggctgtttctcaaaaaattaaacaataaattaccatttgatccagcaattccacttctggacatactccacatagaattgaaagaaatttgaagaaatatttgtactctgatgttcagagaagcattactcacactagccaaaaaatggaaacaaccaaaaagtccattgaaagataagtgggtaggcaaatgaggtgtatctacaattaaaatgttattcaaccttaacaaggaataaaattccaatacatcgtgcaaaatggatgaaccttaaagatattatgctaactgaaataagccagacacaaaaggataattatcatataattccatttataaaagatagttagaatagccagttacatagagacagaatgtagaatgttgtgtgctaagggttatggggagaaggagtgagttactgttcattgggtacagaggtttaatatggtaagaggaaaaagttctggaaatggatagtgtgatggttacacaacactaaattgcacacttagaaatagttaatggtaagtcttatattagatatatataaagtgtttggtagtcttaccctctctataattacacactttttggcactgcccctttcctgcgatgcagagccccaggggtgaatctccctatttctccagctctgcatcagtcactatcctccgtgctgtgtcccacatgctgtgcccacagcctcatacagccggtgacttcagagccaggacgcagctcaggagtctgccctgaggctccctctcttcttatttccctgcagcctggcccgggggaggcttggcttcaactggcagctcgatttagccaaattcaggacaggccaccagggctctttctccacacatgctggtcccaccccaggtggagtcaggcagggccagtcaccagaggagcctggagcagagcaggaagcagagtctgagctgctcctccctcacccaaggggcttccccgtctcatttgggggaacagtgtgagcttgtttcaaagcctcagatgttccttgtagctcatggaagaggtacaagaaaacaaagacgtggcagaaggggatgtgttggtgacatcgagaagcaacttgatcttgaggactctccttctcatccgtctctgaagtctcttctaccacatagggctcagggctgataaagccccctccctaactttcttaggccagacacaaggtcagccatgagaaaacaaaaacaagaagagagtctgtagagacaaattgggagggttcaggaggagaatttgggatttgcttgtgcccatgggacacaggctgggaataaaaatgttttcctaactcttctctgaaagccagatagactccacctaaaaccctattgccaaggatgctgggatccacttaccagagacttcgactgtcatggatttggagctttccttgccagtggctgagttacgaacagagcaagcatagagccctctatgctttgtagtaatttgggggataaagagcttttgttctgattgctgaaacttcccattaattgtccaagagtactatgccggtgggttacattccgcgaagcaggacaagtaaaggttttgtcctgaacggtaataggtgaatgaagggtaaattctggggaggtctggaccatctggagcaaagagaataaagccacaggtgatgtcatccgagggaaggggatgctcctggtctcttaaagggacacagtgaccctctgagccaagacacaccttcaagtcccagccgaaccccctctatgttcactgagctgaagcctgaggtattcacctgtttctccccaatcacaagctatgggcaccaagtctcccatgacaagagcgtcccctccccttatattcttggttaaggctgtgcctacccaggatttcccagggcagggagtcatggccagctcggatgtccagaagtaaaggtgtctatacttggaccggagaaagactgagaggactggcttgtggtcatttagagttaagctggtgtcctggcccacagaggaacaaaagatactcacagaggacattcagggtgactgggttactgcggatgccaccatatcggtcccgtatttcacattgatagggtcctgtttcatttctcgtgacactgggtagaatgaggatcctgttttcaatgggtcactttaccctgggactgactgggaggctctgaccatttagccaccacgtgtaggtgtagttctcacttttagggtcacaggtgaagggtaagacatccttattctccctgggttttgagttgttgatggtgatgtagggcttgggcagcttcgctgtgtggataacagagagaagattgtcctgtgtgacacctttgattcctccacaggcatccctcaatcagagttggcatctcccacctgtcatcccacgcgagtccttgaaagccaatagctggtgcatgtgtcacaagacagatgtatgatgatctaagggctcaaagactgtgaggccgcctgctctgtcttagggaagcatagactttctcaagtgtcaattgagcagcagtgttgggtcatggacagacacatcagtaggagtcacagcccctggtacccctcccagtccctccctaatcagttgactggctggctcaccttgggttccttacctggaatatgcaactgctgggccccttccaaattccatcctactttgtccccctagacgtgatttctctgcagcttccatttccaaggacattctagagatgagtaataatgggacttcccattgtcctgaaaccctgaatatactgagcagcctggcctgggactggatgtttcagcaaaaataagacagcagagaccatagtcaagcctggaggtcagttcagtctacaggcagtggaggcaaaaggtggggcagttttttgcaggtgtttcatgatgacttacttgaaccagtgacctctaaagatagagcagagtgcaaggaatgatctagaaagagtgaaggggacaggcaagagctggaggctttggagcagaaccatgttgcctgtcctgcgttcaagtttcctctccttctgcagagggcaggtgaggaccatgtggatctttccagaaatacatgtggacatttgcatatgcagaactgattggtggaaagggtgggaatgaactgctggaaatctggtcctcatggaccatgtgtgtttgatggatatgatacaaatttagagagaagttttgcaaatattttatttcattggacattctactctctgattccatgggttcgactactctagggacctcatgtaagtggattccagagtgaatatgagaagagactgctggtttccaggagctgggagtggggagaatcagaaattgttcatgggtgtgcagtttcagttatgcaaggtggggaggttatagagattggctgtcgagcttgatacctatagttcacacagattgagtatttcttatgcataagacttaggacaaaaagtgttttggatttctgacattttttgattctgaaatatttgtcatatacttactggtttagcatcccaaatctgaaagattcaaaatctaaaatgctccagtgagcatttcttttcagcatcagattagtaggcaaaagtgggaggtgataagccaaagatattcttgccctttttttttctctcaccacatttctagcttggtgattagtttttggtcaattccatactggccatgctgcactcgtatgtttttgaaggttttgggatgtgagaaagcctgattgctattttctgtgtcatcagaactttccaccttttcatggctgcatcatctttttctcagtgtttgtgttgtggcagtgattaataacagcctgtcaggtcagatttaggacagagttttctgattctgcaaaaaattttactgcgattctgctaggggttgcattgaatctgcaactcactttgggtagtattgtctttctaacaatattgactcttccaatccatgaaaatgaaatgtctttccatatattgatattgcatttaatttctttcagcaatgttttgtagtcttcagtgtataatcatttgacctttttggttaaacttattccaaaatagtttattccttttgatgttaatgtgaattgaaattcttttcttaatttcccttcagatagttcattgttagtgtatagtgtaaagaatgatctagaaagagtgaaagggacaggaaaagctggtggttttggagcagaaacatattccctgtcctgggtttttgattttccctctccctttgcagagggcaggtggctcttccctgatagctagatagacttcactggaaaacatattgccagtcctccagggatccactcaccagggactatgatcctcttgattatgagatttgttccaccaatggctgagttatggatgaaacagacatagacccctctatatgttttggtgatttggggtataaataacacttgtgctgattgctggaacttcccatcaatcagccaagaatgctctgctagtgggtgagagtctgtgaggcaggagagcttggggacttcccttgtatggtaataggtgtatgaggaagaaatggtgggggcatccaggccatctggagcaaagagaataaggtcacaggtgatattgtcagagggaagggaaaatcctggtctgtggaagggccacagttgccccgtgagccaagtcgcaacactgaagtcccaagaaaatccctgctgtgttcactgatctggagagtgagacattcacctgtttctcccatcacaagctctggaccatgagtctcccatgacaggagcagcctcttttctcctattgtggatcaagcctaggcctactcttgttttcctggggcagaaagtcatggccagttttgatgtccagggataaaggtctctgtacttggacctgagagggactgagaggcctggcctctggccatgtgtatttgggatggcagcgtggctcacagaggaacagaagatagtcacggaggagattcagggtgaatgggtcactgcggctggcactcactgggttccgtatttcacattcatagggtcctgcagtatactttgtggcaccaaatataaagagggtcctgttggttttggacagctgcaacctttgagtggtagggaggttctgaccattcatccaccacaggtagcttgcgttcggagttgcaggatcacagattaagatcacagcctccatgatctccctggggtttaatttgctgctggagatggagggcttgggagtctccactgtgcagaaaacagggagaagattgccctgtgtggcacctttgattcctccaaaggcatttttcaatcagagttggcatttccaacctctcagcccacccgagtccttaaaagcccatggcaggtgtgtgtgttacaagacagatgcatggcaatctgagggctcagagattgtgaggctgcctgcttcatgtgggagaagcacagactttctcaagtgtgaattgagcagcagcattgggtcatggaaagacacaggaccagcagtcacagcccctggtgcctctctgagtccctccatctccaactgcctgcctggcccaccttttggtcctcacttggagcatgcagtgctggaatcttcttagcttcagtcttactttgcccccgaggcatgttttctctgcagcttccctttccaaggacatcctagagatggatgatggaacttcccattgtccttaaaccctttgggtactggaaagcctggcctgggactgggtacttcagcagaaataacacaggggagaccagagtcaagcctggaggtcagttcagtcatcaggcagtggagccacaaggtggggcagttttcccagatgtctcatagtgactgacttgagccagtgacctctaaagatagagcagagtccaaggaatgacctacaaagagtgaaggggacaggcaagagctgatagctttggacgaagaccacgttccctgttctgggtccatgatgctcccttccccctgtagagggcaggtgaggaccatgtggatctttctggaaatacatgtggatgtttgcaaatgcagaactgactggtggaaagggcaaacatgaactgatgatggaagtctggccctcatggaccatatgtgtttggtggatattagaccaatatttgggaagaagtcttgcagatactttctctcattagacattctactctctgattctgagtttgactactctatgtacctgatatcagtggattccagagtgaatcagagagtagaatagtagtttgcaggagctgggatcaggggaatagggcgttgttccgtgggtgtgcggtttcagttatgcaggatgaggaggttctagagatctcctgtgcagcctcgtgcctatacttcatgcagatacagtgctccttatgcagaaagcttaaaacaaagtgttttggatgtctaattatttttttattttggaatatttgcagtacatgtactggtttagcatcccaaatctgaaaaatttaaaatccacaatgcgccagtgagcacttctttttagcatcacatcagtggtcagaagtgttgagttttgagcatttcagattgtggatttctggatttcagatgctcaatttgtaatactgtaattttcccataaaaagttttcaggactttagacctcatgttatgttctgactctagtaacaaaaaaaaatttggaggaaacattgaaatgttttcataagtgggaatttttactgatggtccaaacatctgagatcaattgctggtagtagtatttctcttgaggccaacataaggtttaggtgtgccatgaattccagcaggatcacattatgctcaaagaaagatgccaaaggtgatttgaaattagcaactccttaagtagagagagtcccgttaaaaggacaaaactgggtagtgtgtcaattacataaagggaggaatgatgccaaattaaaagaagtgatgtgtgttatgttagtaaatatagaaagaactccctgcttctgctttctgtgccgagttaggaaaaatcgggaggagcacaaagcaggtatgtgaaatactttcttcgttctctcttaagttcaggaaataacactagagtttaagtttgtgtgaattaggaagagtctaagtgagatgccaatggctcgtgtgtctccccacaggaagaactcgaacttatgaaagcagcatcatcatgaggaaacagttgtatgtggcacaggcagtaataccatcagatagcacccacctggccacctccagctggtccccaaaaccaccagtattcccattacatgtaggttacagcctttgtagttgtcccacaacaaagaaatttaaaaattgctattgtcaaaacaaaatattaaatatgaaggcgaatatgttgttccactttttttccccactctttttgacctttcttgtttcagttttggaagtttctattgacacatcctcaagctagggattctttcctcagctctgtgcagtctaccagtaagcatcaaaagcattcttcatttctctaacagcattttttattttctgagacagagtctcactctgtcaccccggctggagtgcagtggcatgatctcagctcactgcaagttccgcctcgcgggttcatgccattctcctgcctcaacctcccaagtagctggcactacaggtgcccaccaccaagcccagctaattttttgtatttttagtagagacggggtttcaccatgttagccaggatggtctctatctcgtgaacttgtgcccgccttggcctcccaaagtgctgggattataggcatgagccactgtgcccagccatctctgaaggattttaacgagttgttgacttttgagtttgttcagtttttacttagcgttagaaccgagtgacaaatttcaagcttgttatatgcctgacaggaagccagaagtctctaggaagtgactggagaatgtgagctccacagcaggttgaggatggagtcacgagtgaaatgagcccatgggctttggggactgcaggcctgtccagcctctgacaccctggtgagtcagagcaaagattacaacagtgacaggaaactagcgtggctgactccatctggcatctagtctcaggctggctgtcctcactcattcctgggcataggccaggctaacattgggaggaatttagtttatggtttaactttgaaacaagaaagataatagtacctccataaaactaacacccttactttgcccaggggctgcctttctaaaactagtgaaagaccatgagattgagattataggagggaaccgaattctgctacaatgtaggcacagtttctataatccctgactgatcaaatgtcatttggccagagtttacaaaatttgtaactaattgctcccatagataacatcactattgcagaacgtgagattagtcttttgagatgtttttcattcttttgcattctggcaactggctgacctcatccatacccatgactaatggctcagccagccatgtggtccctacctagaagtggattcaagcacaaacagttcatttccctccgcccgcatgattccatcaccaaacaatcagcagtactcattttttagtcctgtgtccctgaaatcatccttggaaatgtctaacacctgatccactggggaggctgatttgagtaataataaacctctgtcctcctgtttggcagacttggagtcattaaaatctttctttactacaaaccaccatttcaataattttttttttgtgtgtgtgtttgtgtctgtgtgtgcagaaggccagaagaacttgtctggcaatgataacagtggatggagaactgcctatccctgtcccatggtcttgtccacaggtcagcctcacaaagggaaagagccctagatgggaatacattggaagctcattctcttagtgacctggggacattggctggagataaagcccggcaggagtggcaactccaggtgatttctacacctttcctatttcctgggaggtgggccaggccacagtgttagcaggaagggaacagaactgccagactaattagagggagtgtctggggaaggcctaggtgtggaggaagaagctgtgcaggacagggcttgccagtcagaatgaagtgggaggaagatgagggacacagagaagcagagagaggcagagacaccatggcagtgagcagtgagggagacactgacttcagagaccccaggtaccaggtgcccccatttcctcagtccaggaccaaggagccctgagaaccctccggtggccaaagagcttcagagttgcatgaggtggggtggctttaggggcaagaggtagtagggggatgaaacatgggtgtcagcctctgaaggacaagggacaggtgtggctaggacctcctaggattctgcatccaagatccagtctctaaagaggttttggatcattcatttcttcatttgattccttcatttgttatgtgagagctcctgagtatgtgtctctggctgggcctgtgctggtgcagggtgtgagtggggaaagaaaacaaggtcctctccttgatcctctcatgacagtaacatggacactttgggaaacacaggatttcaggttcagtgatgggggttaagatctgagggggaggcctggacattttttttgcactgactctgatggttgaggcaggtgatttagttctggagtacagactaatcagctgaccatttgctctcactcctctgaggtttggatgcctaagaagagaggatttgagccaataaatgactatggggtgcttgaaacccagtaagccctcacttctggtggaggagaggatgggcctgtggctgcagacagacctcatgtgaccctgatctcccctttgggtttgtgtgactctggttcaaagactgtgccttcctgtgcctctgttttctctcaatcaaataagttaactggcaaatggactgtggcttttcatgctatctgtgaataaatgttaaagtattcacagtcacctgacttaatgcttggcacagtggaggtgttcacacaaacagcatttattattaatttgcttccatgagaaagcacatttatgtcagatccctgtggacaagctgctaccagttacaccttctctcttctgtttctgcttccgggaacattagactttctatggactgtcctgagcctcccaaggcagttggctgatggcctacaaagcttgtctttctgtcctctccactctgaatgtcaggtgaagaaagctctgtccttgcccagatgaggctctgagggctgagccctagctggtgaacagctgcaggagacacagtcctcagacagctggaaaacccttggtcccagtaagccctgcccaagaagccacaacccagccccagtacaggctccttagatttatctgcagcaaggatttagggacaagggtctggggttgaggcttctagggctgagcttctctgagagtatctcaggtggcctctcaggccaagccctactcagttatccagggtctttctcagggtcaaatttatgaagagggcatgaggtgcctggctgagactgatctcctcctgctgagtccccccatcagactgtccttcctctgcagcgagtgtctgcagggtctggatgtgggaaaggaattctgatctgttgaaatttgtctcctctgtgtgtgtcctgcactaaatgcccaaactccagcatgggacataatgcagagggggacacaggcacagtccaggcctgacaatcctgtgtgtgtgaagtagaagtgacccctgtcccccaacacccagggatcatgtggaatcacttacggtataaggtgaaggtgaaatttccagttactcctctagtcccatcacctcgctgtatgatgtgtaaggtgtaggatactccgtcctcccgggtgacattctggatcagcagggatgcattggaatatactgtttctcgtccactgtatgcaggcccatatgtaattctttgaccgtctactacatatgatgtaatgtaatggtagaggtcccttatttgccctttctaccacatgtaaccagtaagattctggggcaaattgtggacaagtagaagaacatccttcccctcggaaactttgggtggctgggcttcagtcgtgacttgggcaatggtaggtgggttccagaagtttaaaagtgatgctaggaggtggagagagcatcagtcaatattgagacctgtgtattggtgtgaaaacatggggccctgggtcctgagaaggtctcttcagtcctcagccttgacaacacagacacacacacacatacaaacacacacacacacacacaaaagcggcatgtgtgattgtgtgtgtgtatgtgtgtgtgtcctactgtcctactaggtcaaggtcagcagcatgacgcccattccttcaacacttctgaccttggcatttttctgtttggaatcctcttccccaggggtccgcatggccccctccacactgccctcaggtcctgcttacatcagggcatcgttagacttctttcctgatgcctgcttcagagaccctgggtcttccctttctgacctttccctgctctgctccctccagggttcttgtcaacacctgacctcacattctagatctctttgcatgtctgtcttcccccccatgacagcgtgagctccgtgaggacagggacttttgtgatcttggttgcaccccagtgcctggaacaggctgcagactcctgtagatgtgagagttctcagggccctccatgccctgggtgttttttttctcccaattgttgaggttttttgctgaggacagcatttcatgtcctgcttatatttttatttgaagtgtcatctgatatagttattattatcatttttcaaaatgtgctggcctctgatgattaatcaggaaaacagaacacttaagattttcctacctcttaccaattccggttcaatgtgactttcctattttgacccctgtccctctctggtgtattttcccctatccaggcatcaacagagcgttctttccttttttttttctttttttctttttttttttttttgtgacggattctcgtactgtcgcccgggctggcattcagtggcactatctcggctagctgcaacttctgcctcccgggttcaggtgattctcctgcctcagcctcccgagtggctaggattacaggagcacaccaccatacctggttaaatttttgtatttttagcagagacagggcttcactgtgttggccagactgatcgtgaactcctgatctcctgatccactcgcctcagcctcccaaagtgctggcttctttcattttttagaaccccatcctctccaggagaccccatccagtcactctgcttcctcctcctgtcctctcccaggaagttctctcctcacctgtgagcaggacccccttccatttgatgtgctgtgtgcagggaggggctgagaggggccccatggtctctgctgcttgtgtgttctcctctgtggagatgagcctaggttccagaaacttcctgagcacggctgtaggctgtgctgtccttcctccttctgcgctgagcctcttcctggggcaggagcacttctcaggctcatgggtggggttaggcccaggacacctctctgtcccctcctctctacatcctgcctccttgtccctccttctgtttttccttttgtctgtgtttcaggtccctgggaattgtggaggcctctgcctttttcagcagtgattctttcaccaaacctcaacacacactttgtgcagacacaaacacacacagacacacacccccccccccacacacacacagaagagacacacacagacccacagtcacacacataccctgcaggttgggcaagcagagtcctgggcctcagcctccaggtgtccccatgggtcttggttgcggtgcacattcatgccctttgccctctttcatccccatctggctctcccttgcagtgcaggaggctggagctgcaccaggtccctgtcacagtgatgccccattgtgctgtgtgtgagctgtgtgttgcctggtgagaaggacccttcctttctctaatcgtgtctagcttggctgcagcttccaaggatggacattgaggacctgggtgtcacagaggaaagtgtcctacctggaggtgtgcagggtgaatctctcatgcctcttgggaggagaggcctgtgctggttgctctttgggggctgtgattcccatagtcaaagggacagttcttggtcagtctatggctccctcgggtctggcggctgagctgaagctcaggatttctcatgttcttcctgaccatctttgatgtcctctcttctctgcccagctgattgtcctgtggtcaccacaccttccccctggtggtgcaggaggaagtggggagtcacccaggaaccccgtgggacatggctcattgagacgcaggagggggagcctgggacagggcaggggttagaggtggagagattcatcccaacttactccgtggccatgatgggctcagccctccatgtgctgacatacccaggggtctatcctgagggttttgacctggtcaagctgctctctgtagaggaggaagaggcagtggccagagagcctgtctggagggaccttgctcacacctgagagggtgtgtgggggtgagttgtgttctgggatcaaagagcaataacaccccccttctcccagcaagcacacaggagaggtctgtcttcccaagggacagctgggggtaggtggccacatcccggatggtgcctgtgtgtgaccatcacacgcactctgagcaccccggggtgcagcgggcaggcaggtcacagggtgcctgactgattcccggggaggctgtgggtcctcaggcagccgctgttctgtgtcggcgctaggcttggcctgggatgccccagagaagaggacagatggagcaggggcgggtatttagagagcagtgacagaaagagttgatgaggatggagggaggccacgaggggaaagcaccccgtgtagcgtcgcgtgcaccagtgctgccctgggagatgcctttagctgggcccagggaaggagcaggtgtgtggggaggagctacctgtagggggagtggtgttaggttggtggccaccaggtcagggaggagctgacagagtccgtgtggggagcatggagagagctgaggacttaggccgaagtgaccctgatgagggtggatcctgctgggctgtgggttccgctgagggaggttggcatcccctaggaaggctccagggtgggagggactctgtcgccctctggtggacagggagggaagtgtgaacggcagcaatcccaggccaggctgcatgttttattccacatggatctgcacacttcacactaggtcacacatatgttatgttacagctccatcacccttccagccccgtgagtcccagtctctgtggctctatgttcactgttctccctttcacaatcagatgtcccaaacgcagatttttgtcactttctgtgagttcgtgtttgtatgcagtaggcggcactgtatataccctgggggcagtgatgtctagggctgagcagtgcacgtgggcttgggaggagaagagggagcagcagagtgggaatatcaatgtcagagggacagggacaagtcactttcattttctcactcccagggaccagaacccaggattctgactccagggcacagtaccacaccttgctggtgtccctggatgtcatgatgctcatagtgtcatgttgccttggcattcattttttaaggtgtaagtttatttgcctcaaatcagaggcagggcttggtcaccatggcagttttcaatactgtatctggttcaagtggctccagttggtgtccagagatcaaatcttagaggcatctctcctgcttggtgtgctgggctctcctctctccagctgctttctttaaactgataattctgacattcaccctcacatttaaagtgaccacctctcagtcacagcatgagctcctggtcccagtgtttgctgcttgctttgaacacatccattaaagctccctgctggaaatctgtcagataacaccctggacttaataaaggcattggcttaccggtctcttctctcctccctgcctgggctcactgacctctgtgtctgtggtctccaggtgtgccaagtgctccccagtgtctgtaagtagtaaaaatacttacactttcacgttgtggttgtattgctgtggcctcacatgccatccagggcctgacattgacgctgccttgtgggacctgtgctggctgagcccctgctggagctgttgttttatggtctctggttctgctggggacaggagcttccagctaacttgattgaaaaactgatgcctttcattgaaaacactgggtcagatgatgtattcatgggcttcagctgccataacaaacaccttagcctgggtgaattaaataatagaaatctatttttcacagttctgtgaataatgtgctattctaaccactttaaaatccacaatcaagtgaaattaaccacacacacagtgttaaattaccatcaccactattttccctagaaaatttttatcattttaaactgaaagtttgtatcttttaaacaataactccctgtatgttccaccctagaccttgatcatctctactctgtctctatgaatttgcctattcttgatgtttcatataaatggaattatacaattatgttatttcatttctgacatatttcacttagcataatgtttccaaagtccatgcatgttccagcgggtgtcagagcttccttcctctttatggcagattatcattctgttgtatgtgtcaccatatttgtttattcatgtgttgatgaacacttggattgttttcatattttatcttttctgaataatgctgcaatgaacattcccatgcaagtacctgtttgagtccgtactttgggtatatacctaggaatggatgttgtttcaaatgagaatactatgattagcttttgtttttgttattattatactttaagttttagggtacatgtgcacaatgtgcaggtttgttatatatgtatacatgtgccatgctggtgtgctgcacccactgactcatcatttagcattaggtatatctcctaaagttatccgtcccccctcccctcaccccacaacagtccccagagtgtgatgttccccttcctgtgttcgtgtgttctcattgttcagttcccacctgtgagtgagaatatgcggtgtttggtttttttgttcttgcaatagtttactgagaatgatgatttccaatttcatccatgtccctacaaaggacatgaactcatcattttttatggctgcatagtattccatggtgtatatgtgccacattttcttaatccagtctatcattgttggacatttgggttggttccaagtctttgctattgtgaagtatgatattggctgtgggtttgtcatagatagctcttattattttgagatatgtcccatcaatacctaatttattgagagtttttagcatgaagcattgttgaattttgtcaaaggcctcttctgcatctattgagataatcatgtggtttttgtctttggttcttatgctggattacatttattgatttgcgtatgttgaaccagccttgcatcccagggttgaagcccacttgatcatggtggataagctttttgatgtgctgctggattctgtttgccagtattttattgaggatttttgcgtcaatgttgataaaggatattggtctaaaattctcttttttggttgtgtctctgcccggctttggtatcaggatgatgctggcctcataaaatgagttagggaggattccctctttttctattgattggaatagtttcagaaggaatggtaccagctcctccttgtacctctggtagaattcggctgtgaatccatctggtcctggactctttttggttggtaagctattgattattgccacaatttcagatcctgttattggtctattcagagattcaacttcttcctggtttagtcttgggagggtgtatgtgtcaaggaatttatccatttcttctacattttctagtttatttgcatagaagtgcttttagtattctctgatggcagtttgtatttctgtgggatcggtggtgatatcccctttatcattttttattgtgtctatttgattcttctctcttttcttctttattagtcttgctagtggtctatcaattttgttgatcctttcaaaaaaccagctcctggattcattaattttttgaagggttttttgtgtctctatttccttcagttctgctctgattttagttatttcttgccttctgctagcttttgaatgtgtttgctcttgcttttctagttcttttaattgtgaagttagggtgtcaattttggatctttcctgctttctcttgtgggcatttcgtgctataaatttccctctgcacactgctttgaatgcatcccagagattctggtatgttgtgtctttgttctcattggtttcaaagaacatctttatttctgccttcattttgttatctacccagtagtcattcaggagcaggttgttcagtttccatgtagttgacctgttttaagtgagattcttaatcctgagttctagtttgattgcactgtggtctgagagacagtttgttataatttctgttcttttacatttgctgaggagagctttacttccaagtatgtggtcaattttgtaataggtgtggtgtggtgctgaaaaaaatgtagattctgttgatttgggttggagagttctgtagatgtctattaggtccacttggtgcagagctgagttcaattcctgggtatccttcttaactttctgtctcgttgatctgtctaatgttgacaatggggtgttaaagtctcccattattattgtgtgggagtctaagtctctttgtaggtcactcaggacttgctttatgaatctgggtgctcctgtattgggtgcatatatgtttaggatagttagctcttcttgttgaattgatccctttaccattatgtaatggccttctttgtctcttttgatctttgttggtttaaagtctgttttattagagactaggattgcaacccctgccttttcttttttccatttgcttggtagatcttcctccatccttttattttgagcctatgtgtgtctctgcacatgggatgggtttcctgaatacagcacactgatgggtcttgactctttatccaatttgccagtctgtgtcttttaattggagcatttagtccatttaaatttaaagttaatattgttatgtgtgaactttatcctgtcattatgatgttagctggttattttgctcattggttgatgcagtttcttcctagccttgatggtctttacaatttggcatgattttgcagtggctggtaccagttgttcctttccatgtttatcgcttccttcaggagctctttttgggcaggcctggtggtgacaaaatctctcagcatttgcttgtctgtaaagtattttatttctccttcacttatgaagcttaatttggctggatatgaaattctgggttgaaaattcttttctttaagaatgttgaatattggcccccactctcctctggcttgtagggtttctgctgagagatccgctgttagtctgatggggttccctttgtgggtaagtcgacctttctctctgcttcccttaacattttttccttcatttcaactttggtgaatctgacaattatgtgtcttggatttgctcttcttgaggagtatctttgtggcgttctctgtatttcctgaatctgaatgttggcctgccttgctagattggggaagttctcctggataatatcctgcagagtgttttccaacttggttccattctccccgtcactttcaggtacaccaatcagacgtagatttggtcttttcacatagtcccatatttcttggaggctttgttcatttctttttattcttttttctctaaacttcccttctcgcttcatttcattcatttcatcttccatcactgatacccttcttccagttgatcgcatcggctcctgaggcttctgcattcttcacgtagttctcgagtcttggctttcagctccatcagctccttcaagcacttctctgtattggttattctagttataccttcatctaaatttttttcaaagtttttaacttctttgcctttggtttgaatttcctcctggagctcagagtagtttgaacatctgaagccttcttctctcaacttatgaaagtcattctccatccagctttgttccattgctggtgaggaactgcgttccttttgaggaggagaggcgctctgctttttatagtttcgttttactgctctgttttttccccatctttgtggttttatctacttttcgtctttgatgatggtgatgtacagatgggtttttggtgtggatgtcctctctgtttgttagttttccttctaagagacaggaccttcagctgaaggtctgttggagtttactagaggtccactccagaccctgtttgtgtgggtaccagcagcggtggctgcagaacagcggatttttgtgaactgcgaatgctgctgtctgatcgttcctctggaagttttgtctcagaggagtacccggccatgtgaggtgtcagtcttcccctagtggggggtgcctcccagttaggctgctcgggggtcaggcatcatgaacccacttgaggaggcagtctgcccattttcagatctccagctgcatgctgggagaaccactgctctgttcaaagctgtcagacagggacatttaagtctgcagaggttactgctgtctttttgtttgtctgtgcctggcccacagaggtggagcctacagaggcaggcaggcctctttgagctgtggtgggctccacccagtttgagcttcctggctgctttgtttacctaagcaagcgttggcaatggcgggagcccctccccgagcctcactgccaccttgcagtttgatctcagactgctgtgctaggaatcagcgagactctgtgggcataggaccctctgagccatgttcgggatataatctcctggtgcgcctttttttatgcctatttcaaaagcacagtattaggatgggagtgacccgattttccaggtgccatctgtcacccctttctttgactagaaaagggaactccctgacctcttgtgcttcccgagtgaggcaatgccttgccctgctttggctcatgcacagtgcactgcacccactgtcctgtgcccactgtccagcagtcgctagtgagatgaacctggtacctcagatggaaatgcagaaatcacccgtcttctgcatcgctcacgctgggagctgtagaccagagctgttcctattcggccatcttggctccaggaccctatgattagctttttgaggaagagcaaaactgtttctcctagtggctgtacttttttatattctcaccagcaatgtatgaggattccaaattctacataatgctgccacttgttatttaacattttaaaagaattgtagccagttttgtaggtgtggtgtggtatctcattgcagctttgactttgtattttcctaatgactaatgatgttgagtatcttttcatgtccttcttgactatttgtatatcttctttgaagaaacatctatttgagtcttttgtccatttataaattggatggtttctccctttgttattgagttgtagctagttcttgatattatctggacatgaaaactgcctatatgtggtttgcaaatattttctctcattctgtgtctattaattattttcttgatgatttcctttgatgcacaaaaggctcacatcttgataaagcccaatttatcttttttttctcatgcttttgtatcatagctaagaatccattgcacatttgaggtcatcaatatttacctctatgtctattttaagatgtttttatggttataggtcttatatttaactcactgatcaattttttagagaattgtttgatatggtgggaggtagagttatctaaattcactgttttgcatgtggttatctagttgtttctgcattatcattagaaaggagaattgttcctccattaaattgtcttgacacactcttcaaagagtaattgaccataagtgtgagggtttatttctaggctctcagttctatcccatttgtctttatgtccattcttttgccagcagcttatgtctattctttgccagtagcttctgttttaataattgtactcctttgtgagatttcaaataagaaagttcaagtcctacaatttattttggcaagattgttttggctattcaggggtccttttttgaaaggtggggaggccaatatttcacaactgggaaagccgtttctgtcttcttcagggggaaatttgggagaacattttaagaaactttatctaagtaggtaaactgttaccactttatttgctgaagtgctacgttaaagtgtgcattgcctcttgtggaagaattatgagaccctggaagcactagcccacatggtaagagacagtgaattccacaatgaggggcagagaggatgttgttttgggatacaatgttgttgggggagtggtatacatctctacttctttatgtctctgtatagttggtgtagggaccagccacacaaggtcagtgggtttttctccctgtgtgtggagatgagagattgtagaaataaagacagaagacagagataaaagaaaagacagctgggcctgtgggaccactaccaccaagacacagagaccggtagtggcaccgaatgccaggctgcactgacatttattggatacaagacaaaggggcaggataaggagtgtgagccatctccaatgataggtaaggccacaggggtcacatgtccactggacagggggcccttccctgcctggcaaccaaggcagagtgagagaagagaaagagagagagagcttacagcattatttctgcttattagagacttttagtactttcactaatttgcttctgctaactaaatggcagagccaggtgaacaggttggaacatgaaggtggactaggattgtgaccactgaagcacagcatcatagggagacagtcaggcctccaaataactgcaggtggacctgactaatgtcaggccctctacaagaggtggaggagtagagtcttctctaaatttccccagggaaagggagactctaagtagctttcctggtctgctaagtagcaggtgtttttccttgacactgaggctactgctagaccagggtccgcttggcaatgggcatcttcccagacgctgtcattaccgctagaccaaggagccctctagttgccctgtctgggcataacagaaggctcacactcttgtcttctggtcacttctcactatgtctcctgagctcatgtctctgtatggcctggcttttcctaggttatgattatagaaatgaggattattataatattggaataaagagtaattgctaccaagtaatgattaatgatattcatatataatcatatctaagatctatatctggtataactattcttcttttatattttattataccggaagagcttgtgccctcggtctcttgccttggcacctgggtggcttgccacccacaagtgggcatctccgttggacacagtaggttttgaaatccttgtttatcctctggggtctgggtcttggcttacctgttagctgcagctgaaagaggtgtctgctaaggcattgccacctgtggtgagaagaagggttcagcagagtgaaagtagctggggctcagagaaaccaggaaagtctgactcttagaaactatgggtcagcagatgggtgtcctcaggggtaaatgggccatgccagtagacattgcagtggactggaagaaggtaagggatgccaggtatcccatgttctgtctcagctctgcagctgaagatttgggccatgggcttgtacggccctgcagcaggggaagggtatagaggaatggctgcatatcaggaccaagtccatgtcatcttcttaggcattgttaccacagatggaggattctgttcagagactggcctggacacatgggagggcccaccccattcttttaaaattattttaagagaacagtattagcaaaggtggtacatgttttattctgctagaatgtcttactgtcacgttttacaatgtatctcttaggaaacggcaagagccatccacacaatgtggatttaaaggggactctattataatttcagctttcctacgtcttcatacaaaccatcttctctgcaaacacacaggcaatatctctgtgttcatttctattgggagccctgtatgcaaggtggagagagccacatttccccctgagatgttatgtaaaagtttgaggttgagatgacatatctgacactctgttgttactctcagaagctactacatgtgaaattctaatgactgcattatcctgccaagtgaaagaggcaggcatgagcaaggacagttaagaggggggagagcctcatcatgatggggagtcttgttctgacatcttgggaaaaactgtccacagtgtgaagtcatccacttgttgtcctggtttacagtttgagcatctgttgttatggtgtcgaatattttggtgagttctgagtggctcatgcttcacgtacaagggttttcccatgaaatttacattgagttgtccacctccagcttatagggcttctggaacagagtgggtcttgctcttagtgattccatgggagaaaatggaattggaggtactagtagaattcagggaactgtccagtctacaggtggataataaaaacacagaaacaatgaacagagctgcagtctcataacaggtatactacagtttttattttccacataatttttccctctatgggcatctctacttttaccaatgataatttcagtagaataagtttgtttgcaaaataggtggagtttcttcaaatgtggtctgattgtttacataagtgcagcaagagtagcaatggaccatgtaggctgtcttctaaaattttcttttctctaagtttttataaggaatctgagattaaatcttcacaaacctcttgagaataggaagccaaaccaaggctgacttcagactttgcctgcagttcatattggttcattctatctatgtttttaatataacatccgaatcaaagcattggtaatataaccaatgatttcaaatgtgtcatgttacaaagaaagcagattgttactgtacttgtgcaaatatgtgtattaccataaacatatcaattctcatgaatagttgcccaattctggggcagtcaggtagaaagcaaaagtaaatgtttcaattacggttcccagaagtatagtttattgaactgctataagctgtagatagattaaaagagaaaaattccatcaatgtagaaaacaaaccatttaaagaatcagcaaattttcaaataaaaatcataaaaacattatcttcattattatcaattatttcaatgaaatcaatgttcttcctgcttggtctaggctgggaatattatgaagatatcagcctgtttgttaaagttttcgaagttcttagacaaatttggagggttcaggaggagaatttgggatttgcttgtgcccatgggacacaggctgggaatacaattgttttcctgactcttctctgaatgccagatagactccacctaaaaccctattgccaacgatgctgggatccacttaccagagacttcgactgtcatggatttggagctttccttgccagtggctgagttacgaacagagcaaacatagagcccgctatgctttgtagtaatatggcggataaagagcttttgtcctggtagctgaaacttttcattaattgtccaagaatactgtgccggtgggttagagtccgcagaacaggacaagtagaggacttctcctgaacggtaataggtgaatgaagggtaaattctggggaggtctggaccatctggagcaaagagaataaagccacaggtgatgtcatctgagggaaggggatgttcctggtctcttaaagggacacagtgaccctctgagccaagacacaccctcaagtcccagcccaaccccctctatgttcactgagccgaatcctgaggtattcccctgtttctcccatcacaagctgtgggccccaagtctcccatgataagagcatcccctccccttatattcttggttaaggctgtgcctacccaggatttcccagggcagggagtcatggccagctccgatgtccagaagtaaaggtgtctatacttggaccggagagagactgagaggcctggcatctggtggtttggatttaagctggtgtcctggcccacagaggaacaaaagatactcacagaggacattcagggtgactgggtcactgcggatgccaccatatcggtcccgtatttcacattgatagggtcctgtttcatttctcgtgacactgggtagaatgaggatcctgttttcaatgggtcgctttaccctgggactgaccgggaggctctgaccatttagccaccaaatgtaggtgtagttctcactcttaggttcacaggtgaagtttaagacatccttattctccctggggtttaagttgttgatggtgatgtagggcttgggcagcttcgctgtgtggataacagagagaagattgtcctgtgtggcacctttgattcctccacaggtatccttcaatcagagttggcatctcccacctctcattccacccgagtccttgaaagccaatagctggtgcttttgtcacaagatagatgcatgatgatctaagggctcaaagactgtgaggccgccttctctgtcttagggaagcacagactttctgaagtgtcaattgagcagcagtgttgggtcatggacagacacgtcagtgggagtcacagcccctggtacccttcccaggccctccctaatcagttgactggctggctcaccttgggttccttacctggaatatgcaactgctgggccccttccaaattccatcctactttgtccccctagatgtgatttctctgcagcttccatttcaaaggacattctagagatgagtaataatgggacttccctttgtcctgcaaccctgaagatactgagcagcctggcctgggactggatgtttcagcagaaataacacaggggagaccagaatcaaggctggaggtcagttcagtcatcaggcagtggaggctcaaggtggggcagttttttgcaggtgtttcatgatgacttacttgaaccagtgacctctaaagatagagcagagtgcaaggaatgatctagaaagagtgaaggggacaggcaagagctggtggctttggagcagaagcatgttccctgtcttgggttctttaagtttcctctccttctgcagagggcaggtgaggaccatgtggatctttccagaaatacatgtggacatttgcaaattcagaactgactggtagaaagggtgggaatgaactgctggaaatctggtcctcatgaaccatgtgtgtttgatggatatgagacaaatttggagagaggttttgcaaatattttatttcattggacattctactctctgattccatgggttcaactactctagggacctcatgtaagtggattccagagtgaatatgagaagagactgctggttgtcaggagctgggagtgggtagaatcagaagttgttcatgggtgtgcagtttcagttatgcaaggtggggaggttctagagaactgctgtagagcttgatgcctatagttcacacagattgagtatttcttatgcataagacttaggacaaaaagtgttttggatttctgacattttttgattctgaaatatttgtcatatacttactggtttagcatcccaaatctgaaagattcaaaatctaaaatgctccagtgagcatttcttttcagcatcagattagtaggcaaaagtgggaggtgataagccaaagatattcttgcccttttttttctctcaccacgtttctagcttggtgatcagttttcggtgaattccacagtggccatgctgcactcgtatatttttgaaggccttgggatgtgagaaaggctgattgctattttctatgtcatcagaactttccaccttttcatggttacctctttttctcagtgtttgtgttgtgtcagtcattaataagagcctgtcatgtgagatttaggacagtgttttctaattctgcaaaaaatgttactgtgattctggtaggggatgcattgaatctgcaactcattttgggtaatgttgtctttctaacaatattgattcttccaatccatgaaaatgaaatgtctttccatatattgatatcgtctttaatttctttcagcaatggtttgtagttttcagggtataatcatttgacttttttggttaaacttactccaaaatattttattccttttgatgttaatgtgaattgaaattatttccttaatttcctttcagattgttcattgttagtgtatagtctaaagaatgatctagaaagagtgaaggggacaggcaaaagctggtggttttggagtagaaacatattccctgtcctgggtttttgattttccctctccctttgcagagggcaggtggctcttccctgatagctagatagacttcactggaaaacatattgccaatgctccagggatccacttaccagggactatgatcctcttgattatgagatttgttccaccagtggctgagttatggatgaaacagacctagatccctgtatatgttttagtgatttggggtataaagaacacttgtgttgattgctggaacttcccagcaatcagccaagaatgctctgccagtggatggagtctgtgaggcaggagagcttggggacttcccctgtatggtaataggtgtatgaggaagaaatggtgggggcatccaggccatgtggagtaaagagaataatgtcacaggcactattgtcagagggaagggaaaatcctggtctgtggaagggccacaatcacagtgaccctgtgagccaagtcacaacattgaagtcccagccaaatccccactgtgttcacagatctggagcctgagaccttcacctgtttctcccatcacaagctgtggaccctgagtctcccatgacaggagcagcctcttttctcctattgttgatgaagcctaggtctactctggtttgcctggggcacaaagtcatggccaggtttgatgtccaggggtaaaggtctctgtattggacctgagagggacagagaggcctggcctctggccacgtgtatttgggatggcagcctggctcacagaggaacagaagatactcacggaggagattcagggtgactgggtcactgcggctggcactcactgggttccgtatttcacattcatagggtcctgcagtatactttgtgacacccaatagaaagagggtcctgttggtttcggacagcttcaagctgtgagtcatagggaggctctgaccattcatccaccacaggtagcttgcgtctggagtctcagggtcacaggttaagctcacagcctccatggtctccctgggatttaagttgctgctggagatggagggcttaggagtctccactgtgcagaaaacagggtgaagattgccgtgtgtggcgcctttgattcctccaaaggcatttttcaatcagaattggcatttcccacctctcagcccacccaagtccttaaaagcccatggcaggtgtgtgtgatacaagacagatgcatggcaatctgagggctcagagattgtgaggctgcctgcttcatgtgggagaagcacagactttctcaagtgtgaattgagcagcagcattgggtcatggaaagacacaggaccagcagtcacagcccctggtgcctctgtgtgtccctccgtctccaactgcctgcctggcccaccttgtggtcctcacttggagcatgcagtgctggaatcttgttagtttcagtctcactttgcccactgaggtatgttttctctgcagcttcccttgccaaggacatcctagagatggatgatggaacttcccattgtccttaaaacctttgggtactggaaagcctggcctgggactgggtattctagcataaaacaggggagaccagagtcaagcctggaggtcagttcagtcatcaggcagtggagccacgaggtggggcagttttcccaggtgtctcatagtgactgagttgagctagtgactctaaagatagagcagagtccaaggaatgacctacaaagagtgaaggggataggcaagagctgatagctttggaccaagaccatgttctctcttctgggtccatgatgctcccttccccctgtagagggcagttgaggaccatgtggatctttctagaaatacatgtggatctttgcaaatgcagaactgactggtggaaagggcgatcatgaactgatgacggaagtctggccctcatggaccatatgtgtttggtgaatattagaccaatatttgggaagaagtcttgcagatactttctctcattagacattctactctctgattctgagtttgactactctatgtacctgatatcagtggattccagagtgaatcagagagtagaatagtagtttgcaggagctgggatcaggggaatagggtgttgttccgtgggtgtgcagtttcagttatgcaggaagaggaggttctagagatctcctgtacagcctcatgcctatacttcatacagataaagtgctccttatgcagaaagcttgaaactaagtgttttggatgtctaattatttttttattttggaatatttgcagtacatgtactggtttagcatcccaaatctgaaaaatttaaaatccacaatgcgccagtgagcacttctttttagcatcacatcagtggtcagaagtgttgagttttgagcatttcagattgtggatttctggatttccgatgctcaatttgtaacagtgtaatttttccgtaaaaatttgtcaggagtttagacctcatgttatattctgactctagtaacaaaaaaaatttggaggaaacattaaaatgttttcataagtggaaatttttactgatggtccaaacatctaagatcaattgctggtagtagtatttctcttgagaccaaaataaggtttaggtgtgccgtgaattccagcaggatcacgttatgctcaaagaaagatgccaaaggtgatttgaaattagcagctccttaagtagagagagtcccattgaaaggaccgaactggtcagtgcatcaattacataaagggagaaaggatgtcaaattaaaagaagtgatgtgtgttatgttagtaaatatagaaagaactccctgcttctaaattctgtgcagagttaggaaaaatggggaggacctcaaaacaggtatgtgaaatgctttcttcattttctcttaagctcaggaaacaccactagagtttaagtttgtgtgaattaggaagagtctaagtgagatggcaatggctcttgtgtctccccacacgaagatctccaacttatgaaaatgacatcatcatgaggaaacagttataggtggcacaggcagtaaaaccatcagataacacccacctggtcaactccaactagtccccaaaaccaccggtattcccattacgtgtacattacagtctttgtagttgtcccacagctacaaaatttaaaaattgctattgtcaaaacaaaatattaaatatgaagttgaatatgttgttccactttttttccccactctttttgaactttcctgtttcagttttggaagtttctgttgacacatcctcaagctaggtattctttccacagctgtgtgcagtctaccagtaagcatcaaaagcattcttcatttctctaacagggttttttttttctgagacagagtctcgctctgtcaccccggctgcagtgcagtggcatgatctcagctcactgcaagctctgcctcctgggttcacaccattctcctgccttggcctcccaagtagctgggactacaggggcccgccaccatgcctggctaattttttgcatttttagtagagacggggtttcaccatgttagccaggatggtctctatctcttgaccttgtgcccgcctcggcctcccaaagtgctgggattataggcgtgagccactgtgcgcagccgtctctgagggagtttaatgagttgttgccttttgagtttgttcagctttttacttagtgttagaaccgagtgacaaatttcaagcttgttatacgcctgtcaggaagctagaactctctagaaagtgaccggagaatgtgagctccatagcaggttgaggatggcgtcatgagtgaggatggggtcaagagtccactcagagatggagtgcccagccatctctgagggattttaacaagttgttgacttttgagtttgttcagctttttacttagcgttagaaaccagtgacaaatttcaagcttgttatatgcctgacaggaagccagaagtctataggaagtgactggagaatgtgagctccttagcaggttgaggctggagtcacaggtgaaatgagcccatggggtttggggacagcaggcctgtccagcctctgacaccctggtgagtcagtgcagagattacaacagtgacagcaaactagcatggctgactccatctggcatctagtctcaggctggctgtcctcactcattcctgggcataggccaggttaaccttgggaggaatttagtttatggtttaaacttgaagcaagaatgataatagttcctccataaaactaacacccttactttgtccagggactgcctttgtaaaactagtgaaagaccatgagattaagattataggagggaactgaattttgctaaaatgtaggcacagtttctataatccctgactgctccagtgtcattgggacagggtttacaaaatttgtaactaattgctcctatagataacatcactattgtagaacgtgagattggtcttttgagatgtttctcattcttttgcattctggcaaccggctgacctcatccatacctatgactaatggctcagccagtcatgtggtccctacctagaggcagattcaagcacaaacagatcatgtccccctgcccccatgattccatcaccaaacaatcagcagtactaattttttagtcctgtggccctgaaactatccttgaaaatctctaagccctgatccactggggaggctgatttgagtaataataaacctctgtcctcctgtttggcagacttggagtcattaaaatctttctttactgcaaaccgccatttcaattattttattttatttatttatttgtttttttttttttttgtgcaggaggccagaggaacttgtctggcaattatgagagtggatggaggaactgcctatccctgtcccatggtcttgtccacaggtcagcctcacaaagggaaagagccctggatgggaatacagtggaaggtcattctcttagtgacctggggacattggctcgagaggaagcctggcaggagtggcaactccagatgatttctgtgcctttcctctttcctgggaggtgggccaggccacagtgttagtgggaagggaactgaacagccagagtggttagagggagtgtctagggaaggcctagaggtggaggaagaagctgtgcaggacagggcttgccagtcagaatgaagtgggaggaagatgagggacacagagaagcagagagaggcagatacaccatggcagtgagcagtgagggagacactgtcttcagaaactccagggaccaggtgcccccagttccatagtccaggaccaaggagccctcgagaaccctccggtggcttaagagcttcagaattacatgaggtggggtggctttaggggcaagaggtagtggggggatgaaacatggatgtcagcctctgaaggacaagggacaggtgtggctagaacctcctaggattctgcatccaagatccaatctctaaagaggttttggatcattcatttcttcattccattccttcatttgtcatgtgagagctcctgagtgtgtgtctctctcgctgggcctgtggtggtgtagagtgtgagtggggaaagaaaacaaggtcctctccttgatcctctcatgacagtgacaaggacactttgggaaacacaggatttcaggttcagtgatggtggttaagatctgaggaggaggcctggacatttttttgcactgactctgatggttgaagcaggtgatttagttctggagtgcagactaatcagctgaccatttgctctcactcctctgaggtttggatgcctaagaagagaggatttgagccaacaaatgactatggggtgcttggaacccagtaagccctcacttctggtggagtagaggatgggcctgtggctacagacagacctcatgtgaccctgatctcccctttgtgtttgtgtgactcttgctcagtcactgtgccttcctgtgcctcagttttctctcaatcaaataagctaaatggcaaatggactgtggcttttcatgctatctgtgaataaatgttaaattattcacagtcacctgacctaatgcttggcacagtggaggtttcacacaaacagcatttattattaatttgcttccatgagaaagcacctttacgtcagatccctgtggacaagctgctacctggtacatcttctctcttctgtttctgcttctggggacattagtctttctatggactatcctaagcctcctaaggcagttgggtgatggcctacaaagcttgtctttctgtcctctccactctgagtatcaggtgaagaaagctctgtcctggcccagatgaggctctgagggctgagccctggctggtgaacagctccaggagacacagtcctctgacagctggtaaatccttggtcccagtaagccctgcccaagaagccacaacccagtcccagcacaggctcctcagctttatctggaacaaggatttagggacaagggtctggggttgaggcttctagggctgagcttctctgagagtatctcagggggcccctcaggccaagccctactcagttatccagggtctttctcagggtcaaatttatgaagagggcatgaggtgcttggctgagactgatctcctcctgctgagtccccccatcagactgtccttcctctgcagcgagtgtctgcagggtctggatgcaggaaaggaattctgatctgttgaaatttgtctcctctgtgtgtgtcctgcactaaatgcccaaatcccagcatgggacataacgcagtgagtgacacaggcagagtccaggcctgacaatcctgtgtgtgtgaagtagaagtgacccctgtcccccaacacccagggatcatgtggaatcacttacggtgtaaggtgaaggtgaaacgtccagttactcctctagtcccatcatctccctttatgatgtgtaaggtgtaggatcctgcgtcctcccgggtgacattctggatcagcagggatgcattggaatatgctgtttctcgtccactatatgcaggcccatatataattatttcaccgtctactacatatgatgtaatgtaatggtagaggtccctcatttgccctttgtaccagatgtagccggtaagattctggggcaaattgtggacaagtagaagaacatccttcccctcggaaactttggttggctcggcttcaatcgtgacttgggcagtggtgggcaggttccagaagtttaaaagtgatgctaggaggtggagagaacatcagtcaatattgagacctatgtattggtgtgaaaacatggggccctgggtcctgagaaggtctcttcagtcctcagccttgacaacacagacacacacacacatacaaacacacacacacacacacacacaaaagcggcatgtgtgattgtgtgtgtgtatgtgtgtgtgtcctactgtcctactaggtcaaggtcagcagcatgacgcccattccttcaacacttctgacgttggcatttttctgtttggaatcctcttccccaggggtccgcatggccccctccacaatgccctcaggtcctgcttacatcagggcatcgttagacttctttcctgatgcctgcttcagagaccctgggtcttccctttctgacctttccctgctctgctccctccagggttcttgtcaacacctgacctcacattctagatctctttgcatgtctgtcttcccccccatgacagcgtgagctccgtgaagacagggacttttgtgatcttggttgcaccccagtgcctggaacaggctgcagactcctgtagatgtgagagttctcagggccctccatgccctgggtgttttttttcccccaattgttgaggtttcttgctgaggacagtgtttcctgccctgtttatatttttatttgaggtgtcatctgctatagttattattatcatttttcaaaatatggtggcccctgatgattaatcaggaaaacagaacacttaagattttcctacctcttaccaattccggtccaatacgactttcctgttttgacccctgtccctctctggtgtattttcccctatccaggctccaacagagccttctttcctttttttcttttttctttttttttttttgagatggagtcttgtactgtcgcccaggctggcatgcggtggtgctatctcagctatctgcaacttctgcctcccgggttcacgtgattctcctgcctcagcctcccgagtagctaggattataggagcacaccaccatacctggttaaatttttgtattttcagtacagacagggcttcactgtgttggccagactgatcttgaacttctgatctcatgatccacccacctcagactcccaaagtgctggcttctttcattttttagaaccccatcctctccaggagaccccatccagtcactctgcttcctcctcctgtcctctcccaggaagttctctcctcacctgtgagcaggagccccttccatttgatgcgctgtgtgcagggaggggctgagagggttcccatggtctctgctgcttgtgtgttctcctctgtggagataagcctaggatccagaaactctctgagcacggctgtcagctgtgctgtccttcctctttctgtgctgagcctcttcccagggcaggagcaattctcaagctcatgggcagggtcaggcccaggacacctctctgtcccctcctctctaagtcctgcctccttgtccctccttctgtttctccttttgtctgtgtttcaggtccctgggaattgtggcggcctctgcctttttcagcagtgattctttcaccaaacctcaagacacactttgtgcagacacacagacacacacacacacacacacacacacacacacagaagagatacacacagacccacacagtcagacacataccctgcaggttgggcaagaacagtcctgggcctcagcctcctggtgtccccatggctctgggtcggggtgcaaattaacgccctttggcctctttcatccccatcaggctctccccttcagtgcaggaggctggagctgtaccaggtccctgtcagaatgatgccccattgtgctgtgggtgagctgtgtgttgcctggtgagagggacccttcctttctctaatcatgtctagcttggctgcagcttccaaggatggacattcaggacctgggtgtcccagaggaaactgtcctttctggcggtgtgcagggtgaatctctcatgcctcttgggaggagaggcctgtgctggttgctcagtgggggctgtgagtcccatagtcaaagggacagttctctgtcagtctatggctccctggggtctggcggctgagctggagctcatagtttctcatgttcttcctgaccatctttgatgtcctctcttctctgcccagctgactgtcctgtggtcaccacaccttccctgtggtggtgcaggaggaagtggggagttacccaggaaccctgcgggacatggctcattgagatgcgggagggggagcctgggacagagcaggggttcagagctggagagattcatcccaacttactccgtggccatgatgggctcagccctccatatgctgacatacccaggggtctgtcctgatggttttgacctggccaagctgctgtgtgtagaggaggaacaggcagtggccagagagcctgtctggagggacattgctctcacctgagagggcgggtgggggtgagttgtgttctgagatcaaagagcaataacattccccttcttcccgcaagcacacaggagaggtctgtcttcccaagggacagctggtgttaggtggccacatcccggatggtgcctgtgtgtgaccatcacacgcgctctgagcccccagggtgcagcgggcaggcaggtcacagggtgcctggctgattcccggggaggctgtgggccctcaggcagccgctgttctgtgtcagcgctaggcttggcctgggatgccccagagaacaggacagatggagcaggggtgggcatttagggagcagtgccagaaagagttgatgaggatggagggaggtcacgaggggaaagcacccggtgtggcatcgcgtgcaccagcgctgccctgggagatgcctttagctgggcccagggaaggagcaggtgtgtggggaggagctacctgcagggggagtggtgttaggttggcggccgccaggtcagggaggagctgacagtgtccgtgtggggagcatggagggcgctgaggacttgggcagaagtgaccctgtagagggtggacactgctgggctgtgggttccgctgagtgaggttggcatcccctgggaagactccaggctgggagggactctgtccccctctggtggacagggagggaagtgtgaacggcagcaattccaggccaggatgcatgttttattccacgtggatctgcacagttcacacgaggtcacacctgtgttatgttacagccccatcaccttccagccccgtgagtcccagtctctgtggctctatgttcactgttctccctctttcacaatcagatgtcccaaatgcagatttttgtcaccttctgtgagtttgtgtttgtgtgcagtaggcggcactgtgtataccctgggggcagtgatgtctggggctgagcactgcagttgggcttgggagcagcagggtgggaagatcaatgtcaggggggcagggacaagtcattttcattttctcactcccagggaccagaacccaggattctgactccagggcagagtaccacaccctgctggtgtccctggatgtcatgatgctcatagtgtcatgttgccttggcattcattttttaaggtgtaagtttatttgcctcaaatcagaggcagggcttggtcaccatggcagttttcaatactgtgtctggttcaagtggctccagttggtgtccagagatcaaatcttagagacatctctcctgcttggtgtgctgggctcccgtctctccagctgctttctttaaactgataattctgacattcgccctcacattaaaagtgaccacctctcagtcacagcgtgagctcctgttcccagtgtttgctgcttgctttgaacacatccattaaagctccctgctggaaacctgtcagataacaccctggacttaataaagccattggcttaccggtctcttctctcctccctccctgggctcactgacctctgtgtctgtggtctccaggtgtgccaagtgcttcccagtgtctgtaagtagtaaaaatacttacactttcacgttgtggttgtattgctgtggcctcacatgccatccagggcctgacattgaggctgccttatgggacctgtgctggctgagcccctgctggagctcttgttttggggcctctggttctcttggggacaggagcttccagctaacttgattgaaaaactgatgcatttcattgaaaacactgggtcagatgatgtattcataggcttcagctcctataacaaacaccttagcctgggtgaattaaataatagaaatctatttttcacagttctgtgaataatgtgctattttaaccactttaaaatgcacaatcaatgaaattaaccgcatacaccgtgttaaattaccatcaccagtatttttcctagaaaattgttatcattttaaactgaaactttgtatcttttaaacaataactccctgtatgttccaccctaggccttgatcacctctactctgtctctatgaatttgcctattcttgatgtttcatataaatggaattatacaattatgttattttgtttctgacacatttcacttagcataatgttttccaagtccatgcatgttccagcgggtgtcagagcttccttcctctttatggcagattatcattctgttttatgtgtcaccatatttgtttattcatgtgttgatgaacacttggattgttttcatattttatcttttctgaataatgctgcaatgaacattcccatgcaagtacctttttgagtccgtggatttaattctttgggtatatacctaggaatggatgttatttcaaatgagaattctataattagctttttgaggaacagcaatactctttctcctagctgctgtacttttttatattctcaccagccatgtatgaggattccaaattctacataatgctgctacttgttatttaacattttaaaagaacggtagccagttttgtaggtttgatgtggtgtctcattgcagctttgactttgtattttcctaatgactaatgatgtttagtatcttttcatgtccttcttgactatttgtatatcttctttgaagaaatgtatatttgagtcttttgcccatttataaatttaatggtttctccttttgttactgagttgtagctagttctttatattatctggacatgaaaactgcctatatgtggttgtcaaatattttctctcattctgtgtctattaattattgtcttgataattttctttgatgtacaaaaggctcacatcttgataaagcccaatttatcttgtttttcttgtttctcatgcttttgtatcatatctaagaatccattgcacatttgagttcatcaatatttacctctatgtctattttaagatgttttataggtctgatatttaactcactgatgaatttttcagagaattgtttgatatggtgggaggtagagttatctaaattcactgttttgcatgtggttatctagttgtttctgcattatcattagaaaggagaattgttcctccattaaattttcttgacaccctcttcaaagagtaattgaccataaatgtgagggtttatttctagactctcaattctatcccatttttcattatgtccagtcttttgccagcagcttgttttaataattgtactcctttgtgagattgcaaataagaaagttcaagtcttacaatttcttttggcaggattgttttcactattcaggggtacttttttgaaagatggggaggacaaagtttcacaattgggaaagccgtttctgtcttcttcagggggaaatttgggagaagcttttaagaaactttatctaagtaggtaaactgtcaccactttatttgctgaagtgctatgttaaagtgtgcattgcctcttgtggaagaattttggaccctggaagcacttgcccacgtggtgagagacagtgaattccacgatgaggggcagagatgatgttgttttgtgatacagtgttgttgggggagttgtatacatctcaacttctttatgtctctgtaaagtgggcatagggagcagcccgcagggtcggtgggtttttctccccgtgtgcagagacgtgagattgtagaaataaagacgcaagacagagagataaaagaaaagacagctgggcccgggggaccactaccaccaagtcatggagacagatagtggcccttaatgccaggctgtgctgatatttattggatacaagacaaaagggcaggataattagtgtgagccatctccagtgataggtaaggtcacgtgggtcacgtgtccactgcacagggggcccttccctgcctggcagctgaggcagagagagggaggagaaagagagagagagcttacagcattatttctgcttattagagacttttagtactttcactaatttgctattgctaactaaacagcagagccaggtgtacagcatggaacatgaaggcggactaggagcgtgaccactgaagcacagcctcacagggagatggtcaggcctctggataactgcgggtggacctgactaatgtcaggccctccacaagaggtggaggagtagagtcttctctaaactcccctggggaaagggagactccctttcccggtctgctaagtagcgagtgtttttccttgacactgaggctaccactagaccatggtccgcttggcaatgggcatctttccagatgctggcattatcgctagaccaaggagccctctagtggccttctgtgggcataacagaaggctcgcactcttgtcttctggtcacttctcactcttccctgcttccctcttccaaccacttctgagctacaaatgagaaggaagcgatctgattaaacaggtgatgagcagagtcacgttctgaggggatttgcacttttaaaaggagattaatgaccacatctgacaatgtcaccctggaatcttatgcagagtgacaggggagtggggatgagctccgttcaggttcaggaagcgagagtttggatctgaagtacttttcagatgctgaagtcataggagcttgcagttgcttcctgggtggagccataaacaaacatctcttctgctgagtggggtctgagaagatagagggaacggtgacccaggagctctggaattatctggctgtgttacacttgcaggactacacatatttaagtgaaaacaacatggttttcatccacctggctgacctcttagcctgctttcctcttattgttccctcgaaggcatcattttttgaaagagaaatttaaactctgtccatctcatcccctttggacaaaagttgagtcctttctgagctctttcatcatctggagtttaaaagcttcccctcctctgttaactctctttgaatccctcatgtcacaccaaacttcaaaagagacaaatacttttgcatgactccctgcaggctccgttttgccctgtagtgacagccccatgtcttggctttcctgattggaaaaacttctcaagctttctgcattcatgatctctgcttcttcagtgcaaccttctccagcttgtctctgatctccaatggtccctgcattaatcctgtccaagccacaggtgaccctcatatcatctcagcttctacttcccagtctctctctctctctcttttttttttgagacaggggtctcactctgttgcccaggttggtctcaaactgttgagctctaaagatcctctggcctcatcttcctgagtagctggtaggggtgtgagcccttctgcttggtctccagtcctttgcttttcttttttgacctatacaacatttggtggttgatgtccatgttcatgtaattgtcttctctggcttcttggggccaccatgcattcccttctccctcttttcatttattatcttttcatctagtaagacccatcttcccctgaatatgtatattttcctcaaagcaaggattggcttaccttcacaaactgagtctccaatgaccacataaactgaaatgcaatagaaatcatggacagatgtgagctcctcttctacttcctgtgtcctctgcaggttcttctcaccaacgtcacgtattgttaagtaagccagtgatgttaagttagaaagtggactgattccattaattcatttggcatgttccgaagtcctcacctgagatctatctactctccaaattacacttgttagtaatacaggaagatctttttcacatgagctaattagggtgaatacatgtaagtgttggtaagaagtactagaaacactggaatttgtgagatttcattgaagaaccaacttccacccagcccttcacattgttctcttttggtagtttcttgtcatttcctccttttattatcaatagagctgctgtgaacatgcatgtacaagtttctgggtggacatatgttttcattttttggggggtagacatcaaagagtagaattgctgggttgtatgatgaatctgtgttccaacttttcagaaactggacttctactccttcctgatttcaccttccacgccatttctgtagtgaggcccactccttggccttataagacctgaattaagttaggtgcccagagccgttctgtcattgactctgttctttcccttgctagcctgtgtaataattggcaatcagacctttacgtgcgcaatggtttcatatgtctccccaactatattacaagttccacgggggcagggctatgtctatctccttgacctctgtatctgcgatgcctagcagagggctgtgaacaccggtcaccctccataaacactgggagacaaacaagggagtcagtagagttagtttttttgcctttttacccccagaactcttagaatatgatttgagctattgcttcaaggaagtcctggggcagatgatcattcatagatgacatgagggagtgcacagcacatgagtttgcaggaaaatgcaaaccccacattgaaatttgatccccaatgttggagatggggatctacatgggggtgtttgggtcatgggggcggatccctcatgaatggcttggtgctgccctcatggtaatgagtgggttttctactcaatcctgcaagagctgattgttagaaagagcctggcaccttcctctcctctttctcttgcttcttctctcaccatgtcatctgtgcacacagcagctccccttcccattccaccatgagtggaagctccctgaggcctcaccagaagcagatgctggtgcaatgcttcttgtatagcctgtagaactgtgagccaaataaacctcttttctttataaattatccagcttcactcaggtattcctttttagcaacacaaaactgactaagacagggtatcaggagacctagctttgcctgaatctgagaactccatcaggaatcttggaacaatttagcccacaggtccaaggctgattttttgtcacagtgaagttcaggtagtaagaattctcactggtggctgttgacggtggcggtggtggggatgggtcatatggagaattagcagtgggagactagaaattaaagtggataaagggaagaattaaaagtcaaaaacagtgtgagggaggaaaggaatggatataacacctcacagctttatccttgagaggccttaaagaatctacttaataataatcagatggtattctataagaactttgagactagacatgtgatgacttttaggaaactgccctggagctgaaaatgcatgcaaatctagctgactcagctccagccttaactggctcataacttgtttcataaacatgactgtatgttagcaaggaaatgagagagaataacagcacatcacataggcatgaaaagtatttgcaaagcagcagttctcaacaatgacattttgcagagttttccagaagcagattcagaaaactgaagaccaaagtaatgagggagctgtctcatgcctagatgagcagaagcataccaaaggcttagtatttccccaagtaataggcacctgaaacttatttaaggaaaatactcttcttgatgaaacaggcactgcagttgaagcaggaatgtgtttggtgtgctgccttaaatagcatgggtagatgttcaaacatgttaggactcgctggccctaggaaagacccgcaagtatctggtctacaccaggaaagtgacaatgaaacaccaaacaccttttctcctctaattaccaagaaaagtatttctttcccaatggtggaagacaataatgttgggaatgatgaagttttctggagtgtgaagtggatatgtcttataagtttaatccacagcttcaccacttcataagtggataatcgaattgtgcctcagtttcctcagacttggggatattaagagtatcctcagtcaccacaaggtgggtaccaacataagaaaagagtgtagcaaaagcccatgggtgcatgttcttaaagtgcctagtgtgggattagaatgacaagtggtagatgacctacttgtgcagaaatttagagttattttgtgattttcaaatgatcatgtgtgctttccatatgctgtccagactgggggtgctgcagctagaaagggaagaaggtttccatatttcctgagactggagtcacatcctctcaccaatgcactcacctgctgactaaccagtgtacttctgggaattgcaaatgcatgaaatggcacccattctagactagtcacggcagtgttggtgatggccacagatcgggaacgaccctgacgtttatccatagggaactgggtcatgagccatgatccacatcatggatactgggcagctgtggcaaagaatgaggtatctttcttctgtgtactgggaaaggtttccaagatataccgcacagtgagaaaaacaagaagcagaacaatgcacggtgtgctacctcttacattacataggaggaaatgtaaaattaatttaccaatggccaataagcacatgaaaagatgctcaacatcactaatcatttggaaaataaaaatcacggctacagtgagataccatcttacatccattatgatgattgttcttaaaaaaaagaaaaacagaaaagaacaagtgttggcaggtaggaattggaatgcttgtgtagtgtttgtgggtatgaaatatggcgcacccactgtcatcgtttctcaaaaaattaatcatagacttaccacaagatgcagcaattcggcttctggtgtattccaaaaagaacggaaagcaggggccccagcagatatttgcatgtctttgttcatagcagcattattcacaatagctagatgttggaaataagcccagtgtccatccatccatgaatgaataaacagaatgtggtctatacgtacaaatgaatgggattaaaccataacaagaagggtggttctgatgcgtgcttcaacatgaataagccttgagttctttctgctaagtgaaataatcagactcaaaaagacaaacattgcatgattccacttaacagaagtgcctgacgtcatgaaatgcatagacagaaaatgaaaaggtggttgtcagcggctggagggagggggaaagaggagttgttgtttaattggtaaagaattccagttggggaatatgaaaaagttctgggtggggatggacagtggtggtggttgaacaacaacgtaaatgtacttcctgccactggatgtacagttaaaagtggttaaaatgggccgggcaaggtggctcacgtctaatcccagcactttgggagattgagacaggcggatcactttagattaggagtttgagaccagcctgggcaatatggtgaaaccccatctctactaaaaatacaaaaattacccaggcatggtgacaggcgcctgtaatcccagctacttgggagggtgaggcaggagaatcgcttgaacccaggaggcggaggttgcagtgagccaagacggcgccactgcactccatcctggacgacagagggaatctccatctcaaccaaaaaaaaaaaaaaaagaaattaacgaacgaagagcatctatgttccaaatgcagtgtattattttatgcaggctttcacaagctccaaaagattcaccgtgcagaactggagattctagagaaagaccacgcctcctcctgcgggtaactcttcattcagcaagcagctcttggcttatccctgggcttagtggaattcgaatacctgaccataggacaccaagggctttgggacctgaatgacacatcatgtggtggtgacatctgagttacctggggcgtgcacagcagcctccagcatcccagggagagctgtgtatggggtcaggctcaagcaggtctcagggcaccagtgacccaatgggtgactcagactcccatggcacctgctccttctgtttctcccttcgccatatatatgagctcatgggaaacgctgtgacctcttacagaggaggaaagttcatggacttctagcttctagaactgtgatacaataaactcctgttgcttatctactcctctgcagtattttgtcatggcagccctagcaaactactatagtgactgtgggggttaggatgacaccaagcatcaaatgccactccctgttccaacagtgagaccattccacagcccctgaatgacaagacaggccttcaaactcaagactacctggctaggtaagaagtactttagtcacaccacttctgaactttcttgcctacctgcagggcaggaatttttaccatttttaaatgaggacactgaagctcagagaagtgatgctatttcctgatgggtaagaggtgatatatttcagtcctcagaccaactctggagtagcaaggttctagtcttaagagtcaaacttggctaggcatggtggctcaagcctgtaatcccagcattttgggaggccaaggccggtggatcacctgaggtcaggagttcgagaccagcctggccaacatggtgaaacctcgtctctactaaaaatacaaaaattagctgggcgtggtggcatgtgcctgtaatcccagctacttgggaggctgaggcaggagaatcgcttgaacccgggaggcagaagttgcagtgagctgagattgtgccattgcactctagcttggggaacaagagtgagacatcagctcaaaaaaaaaaaaaaaaaaaaaagtcaaccttgagccaggcatggtggctcatgcctgtaatctcagcactttgggaagccgatgaagtcaggatttcgagagcagcttgggcaacatgctaatacgctgtctctaccaaaaattaaaaaattagtgggtatggtggctcatgcctgtaatcccagctatttgggaggctgaggcacaaggatagcatgaaccctggaggtggagctgcagtgagccaagattgtgccattgtactccagtctggagtgcaaaaaaaaaaagtccatctcaaaaaaaacacaaaaagaataaatatggggcctcatgactgtatattactgggcttccgacctagactgaaagatcagggaagactttcctgaagagaaagtgagctctgatgggcccactgtactctagcctgggcaatgtaatgaggctctgtctcaagaaaaacatgcagaataaaaccacaataagataccactacagaactattagaatggctaagattaaaaagagtgaccatgacaagtgttggcaaggatgtggaggcactggaatgctcacgctactggtgggaatgtaagatggtacaaccactatgaaagcagtctggcagcttctaaaaatttcagcatacacccactatactactcggcaattccattccattcccacattatttttatttaaaggaaaatcaagtggtatgatctttaaggcatttttgcctgacaaatagatgaaatgtgggtagcagcccaacactccctggtaagtcttcacagggcatatgtggactcgtggcccccaggaaatatggctctttccacaagtgctaagtccactctctccatcaatcctaagatgttagttccacagcactgccagcattgggctttgtctatttctttctttctttgtcttttttgagaggggtcttgctctgtcatccaggctgaagtgcagtgatgcaatgttggttgtaatggctcccatttcatttccaattgatcttatttggctcttccctctttttttcttggttaatcttgccaatggtctatcaattttatttatttttcccaaaaatcagctttacattttatttatattttgtattattttgtttcaatttcatttagttctactctgatgttggttattttctttcttctgctggatttgggtttggtgtgttcttgtttcttgagtttctagaagtgtaaccttagattgtctatttgtgctctttcagtctttttgatgtaggcatttaaggctataaacttttagcacactctttgctgtattccagatgttttgatagggtgcgtcactattgttcagtttgaagaatttttaaatttccatcttgatttcatatttgacccaatgatcattcaggagcaagttatttaatttccatgtgtttgcatggttttgaaagttccttttggagttgatttccagtttattctaccattgtctgagagagtacttcatataatttcaattttcttaaatttattgagacttgttttgtggcctatcatatggcctatcttgaagaaagttccatgtgctgatgaatagaatgtatattttgtggttgttgggtagaatattctgtaaatatctcttaagtctatttgctctagggcatagtttaaatccattgtttcttccttgactttctgtcttgatgacccgtctagtgctgtcagtggagtaatgaagtccctcacaattattgtgttactgtctatctcatttcttaggtctagtagtaatggctatataaatttgggagctccagtgttaggtgcatgtttatttaggactgtgatattttcctgttggacaagtccttttattattatataatgttcctctttgtcttttttaagtgctgttgctttaaagttagtttttttgttataagaatagttactcctgctcacttttgtggccatttgcatggggcgtctttttctacccttttaccttaagtttatgtgacactttatggttaggggagtctcttgagggcagcagatacttgcttggtgaattattatcaattctgcaattctgtatcttttaagtggagcatttagaccacttatattcaatgttagtattgagatttgaggtactgttccattcatcctgctatttgttgcctgaataccttggttttattcatttatttattgtatttttgttttataggtcctgtgagattcacgctcaaagaggttctgttctgatgtgtttccaggatttgtttcaagatttggagctccttttagcagttattgtagtgctggcttggtagtggcaaattctctgagcatttgtttgtctgaaaaagactgttatctttcctttatttatgaactttagttttgctggatacaaaattcttggctgataattttttttttctttttctgagatggagtctttccctgttgcccaggctggagtgcagtggtgtgatctcggctcactgcaacctccgcctcctggattcacgccattctcctgcctcagcctcctgagtagctgggattacaggcgcctgccaccaggcctggctaattttttttgtatttttagtagagacggggtttcaccatgttagccaggatggtctcgatctcctgaccttgtgatctgcccgcgtcggcctcccaaagtgctgggactacgggcgtgagccaccgcggccggcctgataaatttttttaaggaggctgcagatgggtatgcatgctcattggaggtgttcttcccttattgaagattattaaaatcacatgtgttgaaaagcatttgggactgtttacttaattgatgagtactcatttatttttacattaattttgataccatgtataaacaatatataaacataggtatggacatatacatatgtgataggcgatacagcatagaacatatacatgtgcacataaagatagagtgcgacagaaatacttcagatttttgattttaaaactttatgcatgaacctataaaactccctgttaaaaaaaaaaaactggatttaaattgtgctattgtaaatataaaaattaacatttatctgaggaagcccttgctgagttttagagagagtaggtagtaaatttacatctcaaagcacacacacacacacacacacacacacacacacacacacacagaagaatttgggtgtgttcaaggaagattaaaagtagatgccaaggtaacacaaaaatgatagaaatttataacaggattttataaggagaccaattttatttccatacatagcttttattttggtctctgttttccaactgtactccaggaaacacactacacaggctcccttcttaagtgctggtgagccactgcatatacagacagcccactttaagggaagaatcaggggagaagagatgcagaccccagaattatgccaacatacaaatgcctaagtcaaaggtcaaactgcacacttgaaatctcatcacctgtttggccctgttttcagtgtactttactttctttaatttctgctctaaagcttttaaatgaactttcactcttgctctaaaatttgcctaagtctcttcttctgccttatgacacttagtttaattctttcttctgaagaagcaagaattgaggctgctgcagacttgtacagatttgctgccattaatatactttagtgccattctacatgatagaatatacatattcttatatttatacatatatataaaatatatgtattcatagaggccttgaatctacattcttgctgcacttcatgtaaacaatccaggtagaagactaaaagttattttggaaatacatttgtcccatatgatttctatttcataaaaatgggagacaggagggggaaaattatttttagaaaaaaacaacagaacaacagttattaaattttagatctgttcatttttttttttgaattttgttatttacctacaatttgggctgaatcctaaattttttcctggctacaaatttcaaaactaatggtttcagaattttcttccattttggtatattataaattaaaactgtgctttttaaatttttatcatttttttattacgcttttaagttctgggatacatgcacagaacctgcaggtttgttacataggtatacatgtgtcatggtgttttgctgcacccattaacccatcatctaccttaggtatttctcctaatgctatccctcccctagtcccccacccctcaacaggccccagtgtgtgatgttcccctccctgtgtccatgtgttctcattgttcaactcccacttataagtaagaacatgcagtgtttggttttctgttcctgtgttagtttgctgagaatggtcatttccagtttcatccatgtccctgcaaaggacatgaactcatccttttttatggctgcattgaattccatggtgtatatgtaccatattttctttatccagtctatcattgataggcatttgggttggttccaagtctttgctattgtgaatagtgctgcaataaacatatgtgtgcatgtgtctttacagtagaatgatctataatctttgggtatatacccagtaatgggatcactgggtcaaatgatatttcttgttctacatccttgaggaatcgccacactgtctttcacaatggttgaactaatttacattcctaccaacagtgtaaaagcgttcctatttctccacatcctctccagcatctgttgtttcctgaccttttaatggtcaccattctaactagcatgagacagtatctcattgtggttttgatttgcatttctctaatgaccagtgatgatgagcttttttttgtatgtttgttggtcacaaaaatgtcctattttgagaagtgtctgttcatgtgcttctcccactttttgatgggcttttttttttcttgtaaatttgtttaagtttcttgtagattttggatattagccttttgtcagatggataggttaaaccttgcaagctgaaactcgatgacttatgtaaacttctggagaaatcatagcaacttatatataaacaacctttgtgcctgctgatgtgtactatacaaaaggtacacatgaacgctggattcagactgcaattcagaaaaatgtgtcagattgccattgcaattagaagatgcttcagaaactctagaaaacctagtctatagggttagagtgatgtttgccaaacgaattgctctaattgaagcagcagttgtgtgactttaataaagttccaggattatactgtccctttgttgctgtgacttccctttgcctttttctgatttgtcttcatccccttttccacggggcatgacttcttaagaatgagccttcctagtgatgtaggatcagatgaaacatacagtcacaaagtcatgtcttctacaatgctttctctgaaagcttttgaagaatcgagggaccaggtgtgctgacacagacctgtaatcccagcagtttgagagtccaaggcaggaggatcacttgaaaccaggagtttaagaccagcctgagcaacaaagggagaccatgtctctaccaaacataaaataaatcaaattagccaggtgcagtgatgcatgcctacagtctcagatacttgggaggctaaggcgggaggaccacttcagcccaggagttcaaggctgtagtgagtacactccagtcttggtgacagagcaaggttgtgtctctaaaagaaaaaaaaaaaggaaaggaaaagaatggggtaagcaggaaagccaaagatctcgggcatctccagatgattccctgaacaaattgttttttcttggcttcaaaacctttcaagatgtatatttctttgtaaaagaaagacatgccaattgtaactttaagtgagcagtcaaaatctagctcctaaaactgaagtattttaactctcattctgataatatttattttctgaggcaaagaagaaagacaagattagatgaattgtttttctgcccacaccatctcttccgacatgccttatccctttaatcaaatgtataaatactaagcctcctgaaacctcttcagagaaaacacaagccacagaggtttttttgcaactcatgtattcccagggtgtactttcaagttctggctcaataaatctcaatttatcaagacccttgcctcagtcagtcattctggataaccaccatgagtcctgcaaagcccttcagtaatctgttgcctgcctaggtgatgtgtaaggtgagtcaggtcttcatgagtcaaacactcgtcttcctttctgtctttcccaaccctaccactcagtgctgtgtgctctgatctgaccccagctcccaggttgtttgtattggtctaagaaagcaagaccaggaggggcaggttgagaaggaagtaagaagtgaacatggaaagtggcaggtggggctgtcattgctcaaagccacacaccctgggtgcattttatgaatttttctggattcataatcttttccctgtgtgtctatctagaaactcacccccctcctactttcttctcattactctttctgtttctagtgcactcgtttatggccagagaatggccgtgtaaatagttgacaatagaataaaaaatgatgttttctgagacttggaagctggcctttcttttttccaaaagagattggggtttctaaaagctagcttttatgcagggctgtgcagttgtgagtgtagttttagggaacagatgcataagtgaagggtgagacagaaaacaaaatgctggctgtttgtcaaatcctgaaagtaaatgggacaaaaatcatttttgaaggaggatgtcattcaggagaccttgtacatcttagcgtgtcctcttaccagaagaattggaggttgaggttgaattatggatttaagtgacagtgggtatataattctctgcctcagtttttttttttaatctgtaaaaatggggattgtggctcttgggattttttggtgagcactatagttacctgaaaagctcttaggatagtgcctggtgcatagtgagtgctgcatcagtgtgagctattataattatgggaatatacaaaggtatcaccctggccatccagagtggggagatattttctggtcagggtccaggcaggccagctggagatgaagctgattagtagggaagcttaacttccaggagtggaagaatttaggaggagtaaacagaatgcacaacattctgcaaacattcctttacccaacagtaggaatactcagagtgggtgtgtcttccgtgacaatcattatctcctgggaatctaagaatgtgttctagagtcaaatggctttgatgtaagccaaacccagaaatgggcttcagggctgccttgcacatagcattcattcatcttgaaaaaggaaagcattcatcttgctaaaggaatcccctcttctggcccaggccattatttttgtttttgtgctatcctaatttttaaggtgtaagcagaaagactgaagaataaaataatgaagtacatgaatgaaataacagggtagaattgagactgctacatgtaagttaagagaaattgtgtataaatttttgtgaacagaaaaaggatttcttgttgcaaacagacctctctatataaataatacctcctgccttgagtggatagcagaccgcatcacaagaacattccagcagagtcatgagagaatggttagtgtggcttctttaattgtcaggttagactgagtaagttactgaagagaaaggagttgaaggagaagatgggtgagggcaagaaaaatgggaaggtgaaaggaaaggactgaaaggaatgtttaccaagggctcatcaggtaccaggctctgtgactaatgtcttacacatgttaatttactcttccactgtcattttctgatgcagtaagagtcagccttacactgcagatgaggaaagaggctgagggaagtcaaatgagtggcccagggtcatccagccacttcatagcagagctagtgtgtttcactgtggtttgtgcagacagaaaagtgagacatggaaggaaggcaaaacatttttgttgtgggtgatgtttatgaaagtgacccgtatgaggcagaataatggcctcttaaaaatgtccacatccgggccgggtgcaggggctcacgcctgtcatcccaccactttgggaggctgatacgggtggatcacgaggtcaggagttcaagaccagcctggccaacgaggtgaaaccccgtttctactaaaaatgcaaaaattagctgggcgtggtggcgggcaactttaatgccagctacttgggaggctgaggcaggagaatcatatgaacctgggaggcggagattgcagtgagcctagattgtcccactgcactccagccggggcaacatgagtgaaactgtctcaaaaaaaaaaaaaatccacatcctaactcttggaacacatgcatttacttttcttggcaaaaacactgttcaaaggtgatgaggttgagtatcttgagatggaaagcttattctggcttatctggatggctcccagtgtcatcataggggtccttgtaagtgaaagagcaaggcaggagggtcagggtgagaatgatgcagtctgagagactccactggccattgcttgctgtgaacatgtgtgataagacaaaattacaactgatttagttatagatgtaattggtttttatttgtgatttatgatttggggcagctctccctctacagatgcctcagcatcccaagtagctgggactatattgtgggatctggccagcaacctgcaatgcaacagggctctttctttgttcccaggcagatcggcaagttgagaaataaaggacacacacaagatagggaaagctgtgtccaggggtgtcaccgccttctggtcctgcgatgctgccaatgcactggatacaccagcatttattattaagtttagtgagagtgggggtagtttagtgagggatttagggtcatttataggctctccataagggtcacattcctttcccagagctacagacatctgcttttctgggataggaatcttggtaatgtgaaacctccctgactgcccatccattcataggctctctgcagggggaagcacatcacgtgctgttggctcattctggcagtccaacctggcatttttctttacacaatccttcatgcaattttgtacttacaataatcaggagctttaaaggatgtcttgttatgtaaaaatgtgttggctgggtgcggtggctcatgcctgtaatcccagtactttgggaggctgaggcgtgtggatcacctgatgtcgggagttcgagaccagcctgaccaacatggaggaaccctgtctctactgaaaatacaaaattagctgggcatgatggtgcatgcctgttatcccagctacttgggaggctgaggcaggagaatcacttgaacccagggggcggaggttgtattgagccaagattgtcccattgcactccagcatgggcaacaagagtgaaactccatcttaaaaaataaatgaagtgtggttgacatgatatatctgacactgttaacttactctcagaagctacttcttgtgaaatcctaagtacagcattattctgggaagcaaaggagacaggcataagcaaggagaaattaagagaggtaagagtctcatcatgattgatagtcttgttctgacatcttgagaaaagctgtccacagtgtaaagtcatcaacttgttgtcgtggtttgcagtttgagtgtctctaagttatggtgttgaacatttggtgagcttttagtggcccacacctcagacacgagggttttcccatgaaatttacattgagttgtccacctccagcttatatggcttcaggaacagagctgctcttgttcttaatgatttcattggagaaaattgaattggaagaactaaaagaattcagggtccagtccagtctaccagtggattataaatactcaaagataatgaacagtagtggttcaatctggtaacaggtgtactacagtttttcttttcaactagtttttctctctataggagtctctaattttaccaaagataattccagtaggatgaatttgtttgcaaaataggttgagtctcaccgaacttgcccagattttttacctaagtgcggcaagagtagccgtggaccatagaggctctttttaaacgtccctttgctagaagtttttaataagaatctcagatgaaacttccaaaaacctcttgagactaggaaactaaaccaagaccaacttcagactttgcctgctttccctatgggtttattctaggtatattatcaaatataacatcccagtaaaagctttggtaatataaccaatgttttcaaatgtgtcctgttataaagagagcagattcttactgaacttgtgcaaataactttattaccataaacctatgaatactcatgaatagtttcccaattctggggcactcagatagagagcaaaagcaaatgtttcaatttttgtttacaaaagtatactttaccaattgctgaagaaaaaaagttcataaatctggagaataaaacattccaagaatcagcacattttccaataaaaaattatgaaaacattatccttttgattatttagtccaataacattgagtttttttcttctttgtcttgaatttcatgaaggtatcaacctgttctttttctcagtgtctctattgtggcagccattaatgagactctgtctggtttccatggcagggacctgattgacagaaggcccaggtcagcgcatttcaaattcactacctcctttacagagaaagcttctttcccacaggctcccagcaagggtgtgaaagcaagtctagttctccgaggctctctttaactccaatgggtgactggttggaggattcctcatcagccttgcaaaaactcttagaactgcattggtacctaaaacttctttctctttctttttcacaggaatcagctctgcatagcggtctgtgggttctcccatactaccttcatgcctgccccacattccctcacaggtgtcttccctgataaattatcttgtatgtctaatcccatcttggatgcatctcagttggtaaaaactaacataccagacttgattctttgcacttagctttttttctttctctcccacaattagtcagtaaccatgtcctagtgttttatgtgttaccgcttttttcatatctatggaaaaaggtaggtactgttgaggtgcactttctatgtgccaggccctgtgctcaatactttacctgtatctcatttaatccacacaataaccctgtcaggtaggcattatttccattttgctgatgaaaagacagaagcttagcatggtgtaaaaactttcctggtgtcatatggctagtgacaggtggatctgagatttgattctaggactatttgacctcaaggctaatgatgatggtagtaatatagcagctgacattggttcctctttgtgtggcatcttgtttcattgactgcattaaacctttaaaagaatggtatgaagaaagtactcttattgcaattttcaggtgaggaatcaggggttcagagaagttgagtcttgtgcaagaaatttataactgtaaactcttacattaaaaaagaagaaagagctcaggtcaacaacctactttaatacttcaggatacgaaagaagaacaaactaaacccaagcacagtgaatgagggaaataataagtattagggtggatataaataaaatggagaatggaaacagaatagaggaaattactgaaaccaaaagttgattcttcaaaataaaatcaacaaaattgacaaccattaactagattggctaagaaaaaaagagaaaagataaaattactcaaatcataaatgaaaatggactctgagcatggtgggtcatgttttaatcctagcactttgggaggtcacagcagaaggatttcttgaaaccaggtgtttggaccagcataggtaacctggggagatgctgtctctacaaaaaaaaaaaaaaccaattagctgggcatgttgacatgcacctgtagtcctagcatcttgggaggctgaagaaggagaattgcttgagcccaggaggttgaggctgcagtgagccataatcacaccactgtattccatcctagggtggcctacagagtgagagcctgtctctctgtcttaaaagaaaaagaaaaaagaaaaatgaagcgattactaccaattctaataaaataatgattatgaaagtactataaataattgtatgccaataaattggataacctagatgaaatagacaaactcctagaaacacacaaaaatatgaatataactataatcagtaagaagattgaatcaataaaagcatttgatgaaattcagtattttttcataataaaaacattctaagaatggaaggcaaccacctcaacataaaggcaatatgtgaaaaacccaatgctaacatcttacataacagagaaagactgaaaactttccctgtatgagcaggaaaagacaaggatgcctgctattgacacttttattcaacatagtagtgaaaggtctaatcagaaaaattagggaagaatttttaaaaagacattcaaattggaaggaaggagtaaaattatttctgtttatagataacttgaacttatttgtagaaaatcctaaagatggaacaaacctattagaattaataaattcagtaatgttgcacaatacaaaatcaacattcaaacatcagttgtatttcaatacactaaccatgaacaatctgaagggaaattaagaaaaataatttcaatttatattcacatcaaaaagaataaaatatttaggaataagtttaaccaaagaggtgaaatgattatacctgaaatctacaaagtattgctgaaagaaatgaaagatgacatcaataaattgaaagacattttgtgttcatgaattggaagactcaatattgttaggaggacagtgctgcccaaagtgagctgcagattcaatacaattcctatcagaatctcagtgacatttttgcagaaaaagaaaaatctgtcctaaaatttatattgcatctcatgactctaaatagacacacagctttgaagaggaagaatgaagctggaggactcacacttcctgatttcagcatttactacaaagccccagtaatcaatacagtgtggtactggcataaaggaggacatagaaattaatgaaatatcatagcccagaaagaaatgcttgcatatatggccaaatgattttcatcgagtgtgccaagatcgttcaatggggaagggacagtgttctcaccaaatgatattgggaaaggtggatatccaagggcaagaagagtggaacctttacctaacaccatgtacaaaaattaacccacaatagatcaaagatctaaatgtaagagtaaaaactatacaactcttagaagaaaaacttcatgatagtggatttcacaatgatttcttggttgtaacaacaaaagcataggcaacaaataaaatggataaatcagacttcataaaaatcaaaaccttttatatagcccatgcaaagttcctcagcatcacgaatacttagagatatgcaaatcaaaaccacaatgttacaacacctcacacactttaggatggctttgataaacaacaacaatgacagcaacactaaacaacaggtgtttccaagtagatggaaaaattggagctctagtgcattgctgatgggaatgggaaatgttatagccaatgtaaaaagtagtgtggctgtttttcaaaaaattaaacaataaattaccatttgatccagcaattccccttctggacatactccctatagaattgaaagaaatttgaagaaatatttgtacactgatgtacagagaagcattactcacactagccaaaaatggaaacaactgaaaagtccattgaaagataagtgggtaggcaaatgagatgtatctatacattgaaatgttattcaaccttaacaaggaagaaaattacaatacatcgtgcaaaatggatgaaccttgaagatattatgccaactgaaataagccagacacaaaaggataattattatataattccatttataaaagatagttagaatagccagttacatagagacagaaagtagaatggtgggtgttaagggttagggggagaaggagtgagagttactgtttattgggtacagaggtttaatatggtaagaggaaaaagttctggaaatggatagtgtgatagttacacaacactaaattgcacacttagttaatggtaagtctaatattagatatatataaagtgtctcgtggtcttgccctctctataattacacactttttggcactgcccctttcctgccatgcagagccccaggggtgaatctccctatttctctagctctgcatcagtcactgtcctccgtgctgtgtcccacgtgctgtgcccaaagcctcatacagctggtgacttcagagccaggatgcagctcaggagtcagccctgaagctccctctcttcttatttccctgcagcctggcccgggggaggcttggcttcaactggcagctcgatttagccaacttcaggacaggccaccagggccctttctccacacatgttggttccaccccaggtggagtcaggcagggccaggccagtcaccagaggagcccggagcagagcaggaagcagagtctgagctgctcctccctcacccaaagggcttcctcctctcatttgggggaaaagtgtgagcttgtttcaaagcctcagatgttccttgtagctcatggaataggtacaagaaaacaaagacatggcagaaggggatgtgttcgtgacagcgagaagcaacttgatcttgaggactctccttcttgtccctctgtgaagcctcttctaccacatagggctcagggctgataaagccccctccctacctttctcaggccagacacaaggtcagccatgagaaaacagaaaaacaagcagaagagagtctgtagagataagttgggagggttcaggaggagaatttgggatttgcttgtgcccatgggacacagtctgggaatacaaatgttttcctgactcttctctgaaagccagatagactccacctaaaaccctattgccaaggatgctgggatccacttaccagagactttgactatcatggatttggagatttccttgccagtggctgagttacgaacagagcaagcatagagcccgctatgatttgtagtaatttgggggataaagagcttttgtcctgatagctgaaacttcccattaattgtccaagaatactctgccggtgggttagagtccgcaaagcaggacaagtcgaggttttctcctgaacggtaataggtgaatgaagggtaaattctggggaggtctggaccatctggaggaaagagaataaagccacaggtgatgtcatccaagggaaggggatgctcctggtctcttaaagggacacagtgaccctctgaaccaagacacaacctcaagtgacagccaaatcccatctatgtttactaagcccaagcctgaggtattcccctgtttctctcattacaagctgtgggcccctagtgtcccatgacaagagcgcccctccccttatattcttggttaaggctgtgcctacccaggatttcccagggcagggagtcatggccaggtctgatgtccagaagtaaagttgtctatacttggaccggagagagactgagaggcctggcctctggtcgtttggagttaagctggtgtcctggcccacagaggaacaaaggatactcacagaggacattcagggtgactgggttactgcggatgccaccatatcggtcccgtatttcacattgatagggtcctgtttcatttctcgtgacactgggtagaatgagtatcctgttttcaatgggtcgctttaccctcggactgaccgggaggctctgaccatttagccaccaaatgtaggtgtagttccgactcttaggttcacaggtgaaggctaacacatccttcttctccctggggtttaagttgttgatggtgatgtaaggcatgggcagcttcgctgtgtggataacagaagattgtcctgtgtggcacctttgattcctccacaggcatccttcattcagagttggcatctcccacctgtcaacccacatgagtccttgaaagccagtagctggtgcatgtgtcacaagacagatgtatgatgatctaagggctcaaagactgtgaggcctcctgctctgtcttagggaagcacagactttctcaagtgtcaattgagcagcagtgttgggtcatggacagacacgtcagtgggagtcacagcccctggtacccctcccagtccctccataatcagttgactggctggctcaccctgggttccttacctggaatgtgcaactgctgggccccttccaaattacatcctactttgcccccctagatgtgatttctctgcagcttccatttccaaggacattctagagatgagtaataatgggacttcccattgtcctgaaaccctgcagatactgagcagcctggcctgggactggatgtttcagcagaaataacacagggaagaccagagtcaagcctgtaggtcagttcagtcatcaggcactagaggcaccaggtggggcagtttttttgcaggtgtttcatgatgacttacttgaaccagtgacctctaaagatagagcagagtgcaaggaatgatctagaaagagtgaaggggacaggcaagagctggtggctttggagcagaagcatgttccctgtcctgggttctttaagtttcctctccttctgcagagggcaggtgaggaccatgtggatctttctagaaatacatgtggacatttgcaaatgcagaactgagtggtggaaagggtgggaatgaactgctggaaatctagtcctcatggaccatgtgtgtttgatggatatgagacaaatttggagagaagttttgcaaatattttctttcattggacattctactctctgattccatgggttccactaatctagggacctcatgtaagttgattccagattgaatatgagacgaggctgctggaagccaggagctgggagtggggagaatcagaagttgttcatgggtgtgcagtttcagttatacaagttggagaggttctagagatctgctgtagagcttgatgcctatagttcacacagattatctcttatgcataagttttaggacaaaaagtgttttggatttctgatattttttgattctcaaatatttgtcatatacttactggtttagcatcccaaatctgaaagattcaaaatgtaaaatgcttcagtgagcatttcttttcagcatcagattagtaggcaaaagtgggaggtgataagccagatatattcttgcccttttttttctctcaccatgtttctagcttggtgattagttttcggtgaattccatagtggccatgctgcactcgtatatttttgaaggctttgggatgtgagaaaggctgattgctattttctatgtcatcagaactttccaccttttctggttgcttctttttctcagtgtttgtgttgtggcagtcattaagaagagcctgtcagctcagatttaggacagagttttctaaattctgcaaaaaatgttactgggattctggtaggggttgcattgaatctgcaactcaattgggtagtattgcctttctaacaatattgcttcttccaatccatgaaaatgaaatgtgtttccatatattgatatcgtctttaatttctttcagcaatgttttgtagttttcagggtataatcatttgacctttttggttaaacttattccaaaatattttattccttttgatgttaatgtgaattgaaattctttccttaacttcctttcagattgttcattgttagtgtattgtctaaagaatgatctagaaagagtgaaggggacaggcagaagctggtggttttggagcagaaacatattccctttcctgggttttgattttccctctccctttgcagagagcaggtggctcttccctgacagctagatagactttactggaaaacatggtgccaatgctccagggatccacttaccagggactatgatcctcttgattatgagatttgttccaccagtggctgagttatggatgaaacagacatagacccctctatatgttttagtgatttggggtataaagaacacttgtgctgattgctggaacttcccatcaatcagccaagaatgctctgccagtgggtgagagtctgtgaggcaggagagcttggggacttcccctgtatggtaataggtgtatgaggaagaaacggtgggagcatccaggccatgcggagcaaagagaataatgtcacaggcgatattgtcagagggaagggaaaatcctggtctgtggaagggacacagtcacagtgaccctgtgagccaagttgcaacactgaagtcccagccaaatccccgctgtgttcactgatctggagcctgagacattcacctgtttcttccatcacaagctgtggaacctgagtctcccatgacaggagaagcctcttctctcttattgttgatcaagcctaggcctactctggtttgcctggagcagaaagtcatggccagctttgatgttcagggataaaggtctctgtacttggacctgagagggactgagaggcctggcctctggccacttgtatttgggatggcagcctggctcacagaggaacagaagatactcacggaggagattcagggtgactgggtcactgcggctggcactcactgggttccgtatttcacattcatagggtcctgcaatatactttgtgacaccaaatagatagagggtcctgttggttttggacagctgcaacctgtgagtcatagggaggttctgaccattcagcaaccacaggtagcttgcatccggagtctcaggatcacagattaagcgcacagcctccatgacctccctggggtttaagttgctgctggagatggagggcttgggagtctccgctgtgcagaaaacagagagaagattgccctgtgtggcacctttgattcctccaaaggcatttttcaatcagagttggcatttccaacctctcagcccacccaagtccttaaaagcccatggcaggtgtgtgtgttacaagacagatgcatggcaacctgagggctcagtgattgtgaggctgcctgctttatgtaggagaagcatggactttctcaaatgtgaattgagcagcagcattgggtcatggaaagacacaggaccagcagtcacagcccctggtgcctctctgagtccctccgtctccaactgcctgcctggcccaccttttggtccttacttggggcatgcagtgctggaatcttgttagtttcagtctcactttgccccctgaggtatgttttctcatcagcttcccttgccaaggacatcctagagatggatgatggaacttcccattgtccttaagccctttgggtattagaaagcctggcctggaactgggtacttcagcagaaataacacaggggagaccagagtcaggcctggaggtcagttcagtcatcaggcagtggagccacaaggtggggcagttttccaggtgtctcatagtgactgagttgagccaatgactctaaagatagagcagagtccaaggaatgacctacaaagagtgaaagggacaggcaagagctgataggtttggcccaagaccatgatccctgttctgggtccatgatgctcccttccccctgtagagggcagttgaggaccatatggatctttctagaaatacatgttgatgtttgcaaatgcagaactgactggtggaaagggcaaacatgaacagatgacagaagtctggccctcagggaccttatgtgtttggtggatattagaccaatatttgggaagaagtcttgcagatactttctcttattagacattctactctctgattctgagtttgactactctatgtacctcatatcagtggattccagagggaatcagagattagaatagtagtttgcagcaactgaaatcacgggtatagggcgttgttccgtgggtgtgcggtttctgttatgcaggatgaggaggttctagagatctcctgtgcagcctcgtgcctatacttcatgcagatacagtgctccttatgcagaaagcttaaaacaaagtgttttggatttctaattttttttattttggaatatttgcagtatatgtactggtttagcatcccaaatctgaaaaatttaaaatccacaatgcgcgagtgagcacttctttttagcatcacatcagtggtcagaagtgttgagttttgagcatttcagattgtggatttctggatttccgatgctcaatttgtaatactgtaattttcccataaaaagttgtcaggagtttagacctcatgttatattctgactctagtaacaaaaaaaatttggaggaaaccttaaaatgttttcataagtggaaatttttactgatggtccaaacatctaagatcaattgctggtagtcatatttctcttgagaccaaaataaggtttaggtgtgccatgaattccagcaggatcacattatgctcaaagaaagatgccaaaggtgatttgaaattagcaactccttaagtagagagagtcctgttaaaaggaccgaactggttagtgtgtcaattacataaaaggaggaaggatgccaaattaaaagaagtgatgtgtgttatgttagtaaatatagaaagaacctgcttctaatttctgtgcagagttacaaaacatggggaggaccccaaaacaggtatgtgaaatgtcttcttcattttctcttaaggtcaggaaacaccactaaaatttaagtttgtgtgaattaggaagagtctaagtgagatgccaatggctcttgtgtctccccacacgaagaactccaacttatgaaaacggcatcatcatgaggaaatagttgtatgtggcacaggcagtaaaaccatgagataggacctacctggccacctccatctggtccccaaaccacaagtattcccgttaagtgtatgtgacagcctttgtagttgtcccacaactacaaaatttaaaaattgctattgtcaaaacaaaatattaaatatgaagttgaatatgttgttccgctttttttccccactctttttgagctttcctgtttcagttttggaagtttctattgacacattctcaagctagggattctttcctcagctctgtgcggtctatcagtaagcatcaaaagcattcttcatttctctaacagcatttttttttctgagacagagtctcgctctgtcaccccagctgcagtggcatgatctcagctcactgcaagctccacctcctgggttcatgccattctcctgcctcggcctcccaagtagctgggactacaggtgaccaccaccatgcccagctaattttttgtatttttagtagagacggggtttcaccatgttagccaggatggtctctatctcctgaccttgtgcccgcctcagcctcccaaagtgctgggattataggcgtgagccactgtgcccagccatctctgaaggattttaatgagttgttgacttttgagtttgttcagctttttacttagtgttagaaccgagtgacaaatttcaagcttgttttatgcctgacaggaagccagaagtctctagaaagtgaccggagaatgtgagctccatagcaggttgaggatggagtcactagtgaaatgggtgaaatgagcctatgggcttaattgctcctataattgctcctatagataacatcactattgtagaacgtgagattggtcttttgaaatgtttctcattcttttgccttctgacaaccggctgacctcatccatacctatgcctaatggctcagccagtcatgtggcccctacctagaggcagattcaagcactaacagatcatttccctccgcccgcatgattccatcaccaatcagcagtactcattttttagtcctgtgcccctgaaactatccttgaaaatctctaacacctgatccactggggaggctgatttgagtaataataaacctccaccctcctgtttggcagacttggagttcttaaaatctttctttactgcaaaccaccatttcaataaattttattttattttatatttttttgtgtgcaggaggccagaggaacttgtctggcaattacaagggtggatgggggaactgcctatccctgtcccatggtcttgtccacaggtcagcctcacaaagggaaagagccctggatgggaatacagtggaaggtttctcttagtgacctggggacattggctcgagaggaagcctggcaggagtggcaactccaggtgatttctgcacctttcctatttcctgggaggtgggccaggccacagtgttagcgggaagggaacagaacagccagcctagttagagggagtgtctggggaaggcctagggttggaggaagaagctgtgcaggacagggcttgccagtcagaatgaagtgggaggaagatgagggacacagagaagcagagagaggcagagacaccatggcagtgagcagtgagggagacactgacttcaaaaaccccagggaccaggtgcccccagctccacagtccaggaccaaagagccctgagaaccctccggtggccaaagaacttcagagttgcatgaggtggggtggctttagggtcaagaggtagtggggggatgaaacatgggtgtcagcctctgaaggacaagggacaggtgtggctagaacctcctaggattctgattccaagatccagtctctaaagaggttttggatcatccatttcttcattccattccttcatttgttatgtgagagctcctgagtgtgtctctctcactgggcctgtgctgaggcagggtgtgagtggggaaagaaaacaaggtcctctccttgatcctctcatgacggtgacatggacacttgggaaacacaggatttcacattcagtgatggaggttaagatctgagggggagacctggacattttttttgcactgactctggcggttgaagccagtgatttagttctggagtacagactaatcagctgaccatttgctctcactcctctgaggtttggatgcctaagaagagaggatttgagtcaataaatgactatggggtccttggaacccagtaagccctcacttctggtagaggagaggatgggcctgtggctgcagacagacctcatgtgaccccgatctcccctttgtgtttgtgtgactgtggctcagtgactgtgccttcctgtgcctcagttttctctcaatcaaatgagctaaatggcaaatggactgtggcttttcatgctatctgtgaataaatgttaaagtattcacagtcaactgacttaatgcttggcacagtggaggtgttcacacaaacagcatttattattaatttgcttccatgagaaagcacctttgcgtcagatccctgtggacaaacggctacctggtgcatcttctctcttctgtttctgcttctggggatattagactttctatggagtgtcctaggcctcctaaggcagttggctgatggcctacaaagcttgtctttctgtcctctccactctgagtgtcaggtgaagaaagctctgtccttgcccagatgaggctctgaggactgagccctggctggtgaacagctccaggagacacagtcctcagacagctggtaaatccttggtcccagtaagccctgccaaagaagccacaacccagtcctggcacaggctcctcagctttacctggagcaaggatttagggacaggggtctgggattgaggcttccagagctgaggttctctgagggtatctcagtgggcccctcaggccaagccctactcagttttccagggtctttctcagggtcaaatttatgaagagggcatgaggtgcttggctgagactgatctcctcctgctgagtccccccatcagactgtccttcctctgcagcgagtgtctgcagggtctggatgcgggaaaggaattctgatctgttgaaatgtgtctcctctgtgtgtgtcctgcactaaatgcccaaaccccagcatgggacataatgcagagagtgacacaggcagagtccaggcctgacaattctgtgtgtgtgaagtagaaatgacccctgccccccaacacccagggatcatgcggaatcactcacagtataaggtgacagtgaaatatccagttactcctccagtcccatcgcctcgctttatgatgtgtaaggtgtaggatcctgcatcctcctgtgtgacattctggatcagcagggatgcattggaatatactgtttctcgtccactgtaggcaggcccatatataatttgaccgtgtactacatatgatgtaatgtaatggtagaggtccgtcatttgccctttgtaccagatgtagccagtaagattctggggcaaattgtggacaagtagaagaacatccttcccctcggaaactttgggtggcttggcttcaattattacttgggcagtggtgggcaggttccagaagtttaaaagtgatgctaggaggtagagacagcatcagttaatatttggacctatgtattggggtgaaaagatggggccctgtgtcctgagaaggtctcttcaatcatcagccttgaagatatgcacacacacacatacaaacacacacacacaaaagggcatgtgtgtttgtgtgtgtgtatgtgtgtgtgtcctactgtcctactaggtcaaggtcagcagcatgacccccattccttcaacactcctgaccttggcatttttctgtttgcaatcctcttccccaggggtccgcacggccccctccacactgccctcaggtcctgctcacatcagggcatccttagacttctttcctgatgcctgcttcagagaccctgggtcttccctttctgacctttccctgctctgctccctctagggttcttgtcaacacctgacctcacattctatatctctttgcatgtctgtcttcctccccatgagagtgtgagctctgtgaggacagagacttttgtcatgttggttgcaccccagtgcctggaacaggatgcagactcctgtagatgtgagagttctcagggccctccatgccctgggtgttttttttcccccaattgttgaggttttttgctgaggaaagtgtttcatgccctggttacatttttatttgaggtgtcatctgatatagtcattattatcatttttcaaaatgtggtggcccctgatgattaatcaggaaaacagaacacttaagattttactacctcttaccaattccggttcaatgtgactttcctattttgacccctgtccctctctggtgtattttcccctatccaggctccaacagagccttctttccctttttttctttcttctttttattcttttttttttttttttttgaaatggagtctcgtactgtcacccaggctggcgtgcagtggtgctgtctcggctagctgcaacttctgcctcctgggttcatgtgattatcctgcctcagcctcccgaaagctgggattacaggagcacaccaccatacttggttaattttttgtattttttggtagagacacgtctacactgtgttggccagactgatcttgaactcctgatctcgtgatccacccacctcagcctccctaagtgctggcttcttttattttttagaaccccatcctctccaggataccccatccagtcactctgcttcctcctcctgtcctctcccaggaagtcctctcctcacctgtgagcaggagccccttccaggtgatgtgctgagtgcagggaggggctgagaggggtcccatggtctctgctgtctgtgtgttctcccctgtggagatgagcctaggatccagagacttcctgagcagggctgtcaggtgtgctgtccttcctccttctgtgctgagcctcttcccagggcagaagcacttctcaggctcatgggcggggtcaggcccaggacacctctctgtcccctcctctctcagtcctgcctccttgtccctccttctgtttttccttttgtctgtgtttcaggtccctgggaattgtggaggcctctgcctttttcagcagtgattctttcaccaaacctcaacacacactttgtgcagacacacacacacacacacacacacacacacacagacccacacagtgacacacataccctgcaggttgggcgaggacagtcctgggcctcagcctcctgctgtccccatggctctgggtcggggtgcacattcatgccatttgccctctttcatccccatctggctctccccttcagtgcaggaggctggagctgcaccaggtccctttcacagtgatgtcccattgtgctgtgggtgagctgtgtgttgcctggtgagagggacccttcctttttctaatcgtgtctagcttggctgcagcttccaaggatggtcattcaggacctgggtgtcccagaggaaactgtccttcctggaggtgtgcagggtgaatctctcatgcctcttgggaggagaggcctgtgcctgttgctcagtggtggctgtgagtcccatagtcaaagggaaagttctcggtcactgtatgactccgtggggtccggtggctgagctggagctcatggtttctcatgttcttcctgaccatctttgatgtcctctcttctctgcccagctgattgtcctgtggtcaccacagcttctccgtggtggtgcagaaggaagtgaggagttaaacaggaacccggtgggacatggctcgttgagacgcaggagggggagcctgggtcggagcagagtttcagagctggagagattcatcccgaccaactccgtggcaatgttgggcagagcctttcatgtgttgacatacccaggggtctgtcctgagggtttttgacctggccaagctgctgtgtgtagaggaggaacaggcagtggccagagatcctgtctggagggacgttgctcacacctgagcgggcgggtggggggtgagttgtgttctgggagcaaagagcaataacatcccccttctccccgcaagcacacaggagaggtctgtcttcccaagggacagctggggataggtggccacacctcggatggtgcctgtgtgtgaccatcacacgcgctctgagccccgtggggtgcagcgtgcaggcaggtcacagggtgcctggctgattcccggtgaggctgtgggccctcaggcagccgctattctgtgtcagcgctaagcttggcctgggatgccccagggaacaggacagatggagcaggggcgggcatttagggagcggtgacagaaagagttgatgaggatggagggaggtcacgaggggaaagcgcccagtgtggcatcgcgtgcaccagcgctgccctgggagatgcctttagctgggcccagggaaggagcaggtgtgtggggcaggagctacctgcagagggcgtggtgttaggttggtggcccccaggtcagggaggagctgacagagtccgtgtggggagcatggagggcgctgaggacttaggccgaagtgaccctggtgagggtggacactgctgggctgtgggttccgctgagggaggttggcttcccctgggaaggctccaggctgggagggactcggtcaccctctggtggacagggagggaagtgtgaacggcagcaatcccaggccaggctgcatgttttattccacgtggatctgcacacttcacacgaggtaacacgtatgttatgttacagctccttcaccttccagccccgtgagacccagtctttgtggctgtacgttcactgttctccctctttcacagtcagatgtcccaaaggcagatttttgtcacctttgtgagtttgtgtttgtgtgcagtaggtggcactgtgtataccctgggagcagtgatgtctggggctgagcagtgcacgtgggcttgggagcagaagagggagcagcagcgtgggaagatcaatgtcagaggggcagggacaagtcattttcattttctcactcccagggaccaatcccaggattctgactccagggcacagtaccacaccctgcttgtgtccctggatgtcatgatgctcatagtgtcatgttgccttggcattcattttttaaggtgtaagtttatttgcctcaaatcagaggcagggcttggtcaccatggcagttttcaatactgtatctggttcaagtggctccagttggtggccagagataaaatcttagaggtatctctcctgcttggtgtgctgggctcacctctctccagctgctttctttaaactgataattctgacatttgccctcacatttaaagtgaccacctctcagtcacagcttgagctcctggtcccagtgtttgctgcttgctttgaacacatccattaaagctccctgctggaaacctgtcagataacaccctggacttaataaaggcattggcttaccggtctcttctctcctccctgcctgggctcactgacctctgtgtctgtggcctccaggtgtgctgagtgctccctagtgtctgtaagtagtaaaaatacttatattttcacgttcttgttatatcattatagcctcacatgccatccagggcctgacattgaggctgccctatgggacttgtgctggttgagcttctgctggagctcttgttttggggcctctggttctcctggggacaggagcttccagctaacttgattgaaaacctgatgcctttcattggaacactgggtcaggtgatgtattcatgggcttcacctgccataacataaccttagcctgggtgaattaaataatagaaatctatttttcacagttctgtgaataatgtgctattttaaccactttaaaatgcacaatcaagtgaaattaaccacatacaccatgttaaattaccatcaccactatttttcctagaaaatttttatcattttaaactgaaactttgtcacttttaaacaatacctccctgtatgttccaccctagaccttgatcatctccactctctctctatgaatttgcctattcttgatgtttcatataaatggaattatacaattatgttattttgtttctgacatatttcacttagcataatgtttcccaagtccatgcatgttccagtgggtgtcagagcttcattcctctttatggcaggttaacaatctgttgtatgtgtcaccatatttgtttattcatgtgttgatgaacacttggattattttcatattttatcttttgtgaataatgctgcaatgaacattcccatgcaagtacctgtttgaggccctggatttaattctttgggtatgtacctaggaatgcctgttgtttcaaatgagaattctatgattagctttttgaggaacagcaaaactctttctccaagtggctgtaccttttcatattctcaccagccatgtatgaggattccaaattctacataatgctgctacttgttgtttaacattttaaaagaatggtagccagttttgtaggtgtgatgtggtgtctcattgcagctttgactttgtattttcctaatgactatagatgttgagtatcttttcatgtccttcttgactatttgtatatcttctttgaagaaatgtctatatgagtcttttgcccatttataaattggatggtttgtccttttgttattgagttttagctagttctttatattaactggatatgaaaactgcctatatgtggtttgcaaatattttctttcattcttttctattaattattttcttgataatttcctttgatgtacaaaaggctcacatcttgataaagcccaacatatcttgtttttcttgtttctcatgcttttgtatcatatctaagaatccattacacatttgagttcatcaatatttacctctatgtctagtttaagatgtttttatggttataggtcttatattttactcactcatcaattttttagagaattgtttgatatggtgggaggcagagttatctaaattcactgttttgcatgtggttatctagttgtttctgtactatgatttgaaaggagaattgttcatccattaaattgtcttgacaccctcttcaaggagtaattgaccataagtttgagggtttatttctagattcttaattctatcccatttgtctttatgtctattcttttgccagcagcttatgtctattctttggcagcagcttccattttaataattgtactcttttgtgagatttcaaataagaaagttcaagtcctacaatttattttggcaagattgttttagctactcaggggtacttttttgaaaggtggggaggccaatgtttcacaattgggaaagccttttctctcttcttcagggggaaatttgggagaagcttttaagaaactttatctaagtaggtaaactgtcaccactttatttgctgaagtgctatgttaaagtgtgcattgcctcttgtggaagaattatgagaccctggaagcacttgcccatgtggtgagagacagtgaattccacgatgaggggcagagaggacattgttttgggatacagtgttgttgggggagttgtatacatctcaacttctttatgtctctgtacagtgggtgtagggagcagccccacagggtcgttgggtttttctccctgtgtgtggagatgagagattgtggaaataaagacacaagactaagagataaaagaaaagacaactgggcctgggggaccactaccaccaagatgcggagaccggtagtggccctgaatgccaggctgcactgatatttattggatagaagacaaaggggcaggataaggaatgtgtgccatcttcaatgataggaaatgccacctgtgtcacatgtccactggacagggggcccttccctgcctggcaggtgaggcagagagagggaggagaatgagagagagagcttacagcattatttctgcttattagagacttttagtactttcactaatttgctactgctaactaaatggcagaaccacgtgtacagtatggaacatgagggcggactaagagtgtgaccactgaagcacagcatcacagggagacggttaggcctctggataactgtgggtggacctgactaatgtcaggccctccacaagaggtggaggagtagagtcttctctaaactccgccggggaaagggagactccctttccggtcggctaagtagtgggtgtttttccttgacactgaggctaccactagaccacggtccacttggcaaagggtgtcttcccagacgctggtgttaccgctaggccgaggagccctctagtggccctgtctgggcataacagaagccttgcactcttgtcttctggtcacttctcactatgtctcctcagctcctatctctgtatggcctggcctttcctaggttatgattataaagcgaggattattataatattggaataaagagtaattgctaccaactaacaattaatgatattcatatataatcatatctaagatctgtacctggtataactattcttcttttatattttatgatactggaacagctcatgccctgagtctcttgcctcagcacctgggtggcttgccgcccacaagtgggcatctccattggacacagtaggttttgaaatccttgtttatcctctggggtctgggtcttggcttacctattagctgcaactgaaagaggagtctgttaagtcaatgactcctgtacggagtagaaggtttcagcagagtgaaagtagctggggttcatagaagccaggaatgtctgactcttagaaactgtgtgtcagcagatgggtgtcctcaggggtacatgggccatgccagtagccactgcagtggactggaagaaggtaagggatgctgggtatcccatgttctctctcagctctgcagctgaagatttgggccctgggcttgtacgaccctgaagcaggggaagggtatacaggaatggctgcatatcaggaccaagtccatgtcatcttctgaggcattgttactgcagatggaggattctgttcagagaccaggcctggacacatgggagggcccaccccattcttttaaaattgttttaagagaacagtattagcaaatgtagtacatgttttattctgctagaatcagtcttactgtcacgttttacaatgtatctcttaggaaatggtgagagccatccacacaatgtgcatttaaaggggagtctactataatttcagctttcctactctttatagaaaccatcttctctgcaaacacacaggcaatatctctgtgttcatttctattgggagccctgtatgcaagatggagagagccacatttcctcctgagatgttatgtaaaagtctgaggttgagatgacatatctgacactctgttgttaccctcagaagctcctatactacatgtgaaattctaatgactgcattatcctgccaagtgaaagaggcaggcacaagcaaggacagctaagaggggtgagagcctcatcatgatggggagtcttattctgacatcttgggaaaagctgtccacagtgtgaagtcatcaacttgttttccttgtttacagtttgagcagctgttgttatggtgttgaacattttggtgagttctgagtggctcagacatcaggtacaaggattttcccatgaaatttacattgagttgtccaactctgacttatagggcttctggaacagagtgggtcttgctctttgaggttccatgggagaagatggaattggaggaactagtagaattcagggtaatgtccagtctacagtggataataaaaacacagaaacaatgaacagagctgcaatctcataacaggtgtactacggttttattttccacataatttttctctctatgggcatctctagttttaccaatgataatttcagtagaataagtttgtttgcaaaataggttgagtttcttcaaacttggtctgattgtttacataagtgcagcaagagtagcaatggactatgtaggctctcttttaaaattttctttgctgtaagtttttataaggaatctcagattaaacctttacaaaactcttgagaataggaagccaaaccaaggctgacttcagagtttgcctgcagttcatactggttcattctagctatattcttaaatataacatcccagtcaaagccttggtaatataaccaatgatttgaaatgtgtcctgttacaaagagagcaggttgttactctgtttgtgcaaatatctgtattaccataaacatatcaatactcatgaatagttgcccaattctggggcattcaggtagagagcaaaagtaaatatttcaattatcattcccagaagtatagtttattgaaccactataagctagagatagattaaaagacaaatttccataaatctagaaaactatccacataaagaatcagcatattttcaaataaaaatcataaaaacattatcctcattattatcaattatttcaatgaaatcaatgtttttcctgcttggtctaggctgggaatgttatgaagatatcagcctgtttgttaaagttttcgaagttcttagacaaatttggagggttcaggaggaaaatttgggatttgcttgtgcccatgggacacaggctgggaatacaaatgttttcctgacttttctctgaaagtcagatagactgcacctaaaaccctattgccaaggatgctgggatccacttaccagagactctgactgtcacggatttggagctttccttgccagtggctgagttacgaacagagcaagcatagagcccgctatgctttgtagtaatctgggggatagaaagcttttgtcctgatagctgaaacttcccattaattgtccaagaatactgtgccggtgggttagagtccgcaaagcaggacaagtagaggttttgtcctgaatggtaataggtgaatgaagggtaaattctggggaggtctggaccatctggaggaaagagaataaagccacaggtgatgttatccgagggaaggggatgctcctggtctcttaaagggacagagtgaccctctgagccgagacacaccctcaagtgacagccaaatcccctctatgttcactgagccgaagcctgaggtattcacctgtttctcccatcacaagctgtgggccccaagtctcccatgacaagagcgtccactccccttatattcttggttaaggctgtgcctacccaggttttcccagggcagggagtcatggccagctcggatgtccagaagtaaatatgtctatacttggaccggagagagactgagaggactggcctctggtcgtttggagttaagctggtgtcctggcccacagaggaagaaaggatactcaaggatactcacagaggacattcagggtgactgggtcactgcggatgccaccatatcggtcccgtatttcacattgatagggtcctgtttcatttctcgtgacactgggtagaatgaggatcctgttttcaatgcgtcgctttaccctgggactgaccgggaggctctgaccatttagccaccaaatgtaggtgtagttctcactcttaggttcacaggtgaaggttgagacatccttattctccctggggtttaagttattgatggtgatgtagggcttgggcagcttcgctgtgtgaataacagagagaagattgtcctgtgtggcacctttgattcctccacaggcatccttcaattagagttggcatctcccacctgtcaacacgtgtgagtccttgaaagccaatagctggtgtgtgtgtcacaaggtagatgcatgatgatctaagggctcaaagactgtgaggccacctgctcagtcttagggaagcatagactttctcaagtgtcaattgagcagcagtgctgggtcatggacagacatgtcagtgggagtcacagcgcctggtacccctcccagtccctcactaatgagttgactggctggctcaccctgggttcattacctggaatgtgcaactgctgggccctttccaaattgcatcctactttgcccccctagatgtgatttctctgcaacttccatttccaaggacattctagagatgagtaataatgggacttcccattgtcctgaaaccctgcagatactgagcagcctggcctgggactggatgtttcagcagaaataacacaggggagaccatagtcaagcctggaggtcagttcagtcatcaggcagtggaggctcaaggtggggcagttttttgcaggtgtttcatgatgacttacttgaaccagtgacctctaaagatagagcagagtgcaaggaatgatctagaaagagtgaaggggacaagcaagagctggtggttttggagcagaagcatgttccctgtcctgggttctttaagtttcctctccttctgcagagggcaggtgaggaccatgtggatctttccagaaatacatgtggacatttgcaaatgcagaactgactggtggaaagtgtgggaatgaactgctggaaatctggtcctcatggaccatgtgtgtttgatggatataagacaaatttggagagaagttttgcaaatattttctttcactggacattctactctctgattccttggggttgactactctagggacctcatgtaagtggattccagagtgaatatgagaagagactgctggttgccaggagctgggagtggggagaatcagaagttgttcatgggtgggcagtttcttttatgcaagatggggagtttctagagatctgctgtagagcttgatgcctatagttcacaaagatggagtatttcttatgcctacaacttaggacaaaaagtgttttgcatttctttcattttttgattctgaaatatttgtcatatacttactggttaagcatcccaaatctgatagattcaaagtctaagatgcttcagtgagcatttcttttcagcatcagattagtaggcataagtgggaggtgataagccaaagatattcttgcccttttttttctctcaccacgtttctagcttggtgattagttttcggtgaattccatactggccatgctgcacttgtatatttttgaatgccttggcatgtgagaaaggctgattgctattttctatgtcatgagaactttccaccttttcatggttgcatctttttctcagtgtttttgttgtggcagtcattaagaagagcctgtcagctcagatttaggacagagttttctaattctgcaaaaaatgttactgggatgctggtaggggttgcattgaatctgcaactcactttgcgtagtattttctttctaacaatattgattcttccaatccatgaaaatgaaatgtgtttccatatattgatatcatctttaatttgtttcaggaaggtttgtagttttcagggtataatcatttgacctttttggttaaacttattccaaaatattttattccttttgatgttaatgtgaattgaaattattttcttaatttcttttcagattgttcattgttagtgtatagtctgaagaatgatctagaaagagtgaagggtacaggcaaaacctggtggttttggagcagaaatatattccctttcctgagttttgattttccctctccctctgcagagggcaggtggctcttccctgatagccagatagacttccctggaaaacatattgccaatgctccagggatccacttaccagggactatgatcctcttgattatgagatttgttccaccagtggctgagttatggatgaaagagacatagacccctctatatgttttagtgaattggggtataaagaacacttgtactgattgctggaacttcccatcaatcagccaagaatgctcggccagtggatgagaatctgtgaggcaggggagcttggggacttctcttgtatggtaataggtgtatgaggaaaaaatggtgggggcatccaggccatgtggagcaaagagaataatgtcacaggtgatattgtcagagggaaggtaaaatcctggtctgtggaagggccacagtgaccctgtgagtcaagtcgcaacactgaagtcccagccaaatccccgctgtgttcatgatctggagcctgagacattcacctgtttcttccatcacaagctgtggaccctgagtctcccatgacaggagcagcctcttttctcttattgtggatcaagcctaggcctactctggtttgcctggggcaggaagtcaccaccagctttgatgtccaggggtaaaggtctacatacttggacctgagagggactgagaagcccggcctctggccatgtgtatttgggatggcagcctggctaacagaggaacagaagatactcacggaggagattcagggtgactgggtcactgcggctggcactcactgggttccgtatttcacattcatagggtcctgcagtatagtttgtgacaccaaataggtagagggtcctgttggtttcagacagctgcaagctgtgagtcatagggaggctctgaccattcatccaccacaggtagcttgcatctggagtctcaggatcacaggttaaaatcacagcctccgtggcctccctggggttgaaattgctgctggagatggagggtttgggagtctccactgtgcggaaaacagagagaagattgccctgtgtggcacctttgactcctccaaaggcatttttcaatcagagttggcatttccaacctctcagcccacccaagtccttaaaagcccatggcaggtgtgtgtgttacaagacagatgcatggcaatctgagggctcagagattgtgaggctgcctgctttatgtgggagaagcatggactttctcaagtgtgaattgagcagcagcattgggtcatggaaagacacaggaccagcagtcacagcttctggtgcctctctgagtccctccatctccaactgcctgcctggcccaccttgtggtcctcacttggagcattcagtgctggaatcttcttagtttcaatcttactttgccccctgtggtatgttttctcttcagcttccctttccaaggacatcctagagatggatgatggaacttcccattgtccttaaaccctttgggtactggaaagcctggcctgggactgggtacttcagcagaaataacacaggggagaccagagtcaagcctggaggtcagttcagtcatcaggcagtgcagccacaaggtggcgcagttttcccaggtgtctcatagtgactgacttgagccagtgacctctaaagatagagcagagtccaaggaatgacctacaaagagtgaaggggacaggcaagagctgataggtttggcccaagaccatgttccctgttctgggtccatgatgctccctttcccctgtagagggcaggtgaggaccatgtggatctttctagaaatacatgttgatgtttgcaaatacagaactgactggtggaaagggtgaacatgaactgatgatggaagtctggtcctcatggaccatatgtgtttggtggatattagaccaatatttgggaagaagtcttgcagatactttctctcattagacattctaccctctgattctgagtttgactactctatgtacctcatatcagtggattccagagtgaatcagagagtagaatagtagtttccaggagctgggattaggggaatagggcactgttccgtgggtgtgtggtttcagttatgcaggatgagggggttctagagatctcctgtacagcctcatgcctatagttcatacagataaagtgctccttatgcagaaaggttaaaacaaagtgttttcaatttctaatttttttattttggaatatttgcagtacatgtactggtttagcatcccaaatctgaaaaatttaaaatccacaatgcgccagtgagcacttctttttagcatcacatcagtggtcagaagggttgagttttgagcatttcagattgtggatttctggatttgggatgctcaattcgtaatactgtaattttcccataaaatgttgtcaggagtttagacctcaggttatgttctgactctaataacaaaagaaaaatttggaggaaacattaaaatgttttcattagtggaaatttttactgatggtccaaacatctaagatcaattgctggtagtagtatttctcttgagacgaaaatgaggtttaggtgtgccgtgaattccagcaggatcacattatgctcaaagaaagatgccaaaggtgatttgaattagcagctccttaagtagagagagtcccgttaaaaggacagaactggtcagtgcatcaattacataaagagaggaaggatgccaaattaaaagaagtgatgagtgttatgttagtaaatatagaaagaactgcctgcttataatttctgggcagagttaggaaaaatgcggaggaccccaaaacaggtatgtgaaatgctttcttcattttctcttaagctcaggaaacaccactagagtttaagtttgtgtgaattagtaagaggctaagtgagatggcaatggctcgtgtgtctccccacacgaagaactccaacttatgaaaacggcatcatcatgaggaaacagttgtatgtggcacaggcagtaaaaccatgagatagcacctacctggccacctcgatctggtccccaaaccacctgtattcccattaagggtatgttacagcctttgtagttgtcccacaactacaaaatttaaaaattgctattgtcaaaacaaaatactaaatatgaagttgaaatgttgttccactttttttcccccactctttttgaactttcctgtttcagttttggaagtttctattgacacattctcaagctaggtattctttccacagctgtgtgcagtctaccagtaagcatcaaaagcattcttcatttctcaaacagcattttttttttctgagacagagtctctctttgtcacccaggctggagtgcagtggcatgatctcagctcactgcaagctccgcctcccggtttcactccattctcctgcctcagcctcccgagtagctgggactacaggtgcccaccaccacgtcccactaattttttgtatttttagtagagacggggtttcaccatgttagccaggatggtctgtatctcctgaccttgtgcctgcctcggcctcccaaagtcctgggagtataggtgtgagccactgtgcccagccatctctgagggattttaacgagttgttgacttttgagtttgttcagcgttttacttagtgttagaaccgagtgacaaattccaagcttgttatatgcctgacagaaagccagaagtctctaggaagtgacaaaagaatgtgagctccatagcaggttgagaatggagtcacgagtgaaatgggtgaaatgagcccatgggctttgggaactgcaggcccttccagcctctgacaccctgatgagtccgtgcaaagattacaacagtgacagcaaactagcgtggctgactccatctggcatctagtctcaggctggctgtcctcactcattcctggacataggccaggctatccttgggaagaatttggtttatggtttaactttgaagcaagaatgatgatagttcctccataaaactaacacccttactttgcccagggactgccttggtaaaactagtgaaagaccatgagatttagattataagagggaactgaattctgctaaaatgttggcacagtttctataatccctgactgctccagtgtcatttggcaagagtttacaaaatttgtaactaattgctcctatagataacatcactattgtagaacgtgagattggtcttttgagatgtttctcattcttttgcattctggcaaccggctgacctcatctatacctatgactaatggctcagccagtcatgtggtccctacctagaggcagattcaagcactaacagatcatttccctctgcccacatgattccatcaccaaacaatcagcagtactcattttttagtcctgtgcccctgaaactatccttgaaaatctctaacccctgatccactggggaggctgatttgagtaataataaacctctgtcctcctgtttggcagacttggagtcattaaaatcattctttactacaaatcaccatttcaatatatatatatatatatatatatatatatatatatatatatttttttttttttttggtgtatgtatgtgtgcaggaggccagaagaacttgtctggcaattataagagtggatggaggaactgcctatccctgtcccatggtcttgtccacaggtcagcctcacaaagtgaaagagccctggatggaaatacagtggaagctcattctcttagtgacctggggtcattggctcgagatgaagcctggcaggagtggcaactccaggtgatttctgcacctttcctatttcctgggaggtgggccaggccacagtgttagcgggaagggaacagaacagtcagcctagttagagggagtgtctgcggaaggcctagcagtggaggaagaagctgtgcaggacagggcttgccagtcagaatgaagtgggaggaagatgagggacacagagaagcagagagaggcagagacaccatggcagtgagcagtgagggctacactgacttcagtgaccccagggacaaggtgcccccatttccacagtccaggaccaaggagccctgagaaccctccgtggccaaagagcttcagagttacatgaggtggggtggctttaggggcaagaggtagtggggtgatgaaacatgggtgtcagcctccgaaggacaagggacaggtgtggctagaaactcctgggattctgcatccaagatccagtctctaaagaggttttggatcagtcatttctgcattcaattcctttatttgttatgtgagagctcctgagtatgtgtctctggctgggcctgtgctggtgcagggtgtgagtggggaaagaaaacaaggtcctctccttgatcctctcatgacagtgacatgggaactttgggaaacacaggatttcaggttcaatgatgggtgttaagatctgagggggagacctggacattttttttgcactgactctgatggttgaggcagctgatttagttctggagtgcagactaatcaggtgaccacttgctctcactcctctgaggtttggatgcctaagaagagaggatttgagccaataaatgagtatggggtgcttggaacccagtaagccctcacttctggtggaggagaggatgggcctgtggctgcagacagacctcatgtgaccctgatctcccctttgtgtttgtgtgactctggctcagtgactgtgctttcctgtgactcagttttctctcaatcaaataagctaaatggcaaatggactgtggcttttcatgctatctgtgaataaatgttaaattattcacagtcacctgacctaatgcgtagcactgtggaaatgttcaccaaacagcatttattattaatttgcttccatgagaaagcacctttacgtcagatccctgtggacaagctgctacctggtacatcttctctcttctgtttctgcttctggggatattagactttctatggagtgtcctaggcctcctaaggcagttggctgatggcctacaaagcttgtctttctgtcctctccactctgagtgtcaggtgaagaaagctctgtccttgcccagatgaggctctgagggctgagccctggctggtgaacagctgcaggagacacagtcctcagacagctggaaaattcttagtcccagtaagccctgcccaagaaaccataacccagtcctggcacaggctcctcagctttatctggagcaaggatttagggacaggggtctggggttgaggcttctagggctgagcttctctgagggtctcagggggcccctcaggccaagccctactcagttttccagggtctttctcagggtcaaatttatgaagagggcatgaggtgcttggctgagactgatctcctcctgctgagtccccccatcagactgtccttcctctgcagcaagtttctgcagggtctggatgtgagaaaggaattctgatctgttgaaatttgtctcctctgtgtgtttcctgcaataaatgcccaaaccccagcatgggacataatgcagagagggacacaggcacagtccaggcctgacaattctgtgtgtgtgaagtagaaatgacccctgccccccaacacccagggaccatgtggaatcactcacggtataaggtgaaggtgaaacgtccagttactcctccagtcccatcacctcgctttatgatgtgtaaagtgtaggatcctgtgtcttcctgggtgacattctggatcagcagggatgcattggaatatactgtttctcgtccactgtatgcaggcccatatttaattatttgaccgtctactatatatgatgtaacataatggtagaggtccctgatttgtcctttgtaccagatgtagccagtaagattctggggcaaattgtggacaagtagaagaacatccttcccctcggaaacttttggtggctgggcttcaatcgtgacttgggctgtggtgggcgggttccagaagtttaaaagtgatgctaggaggtggagagagcatcagtcaatattgagacctatgtgttgggttgaaaagatgggcccctgggtcctgagaaggtctcttcaatcctcagccttgaagacacacacacacacacacacacacacacacacacacacacaaacacacacacacacatataaaaggggcatgtgtgtttctgtgtgtgtcctactgtcctactaggtcaaggtcagcagcatgacccccattccttcaacactcctgactttggcatttttctgtttggaatcctcttccccaggggtccgcacggccccctccacactgccctcaggttctgctcacatcagggcatccttagacttctttcctgacacctccttcagagaacctgggtctttcctttttgacctttccctgctctgctccctccagggttcttgtcaacacctgatctcacattctagatctctttgcatgtctgtcttcctccccatgacagcatgagctccgtgaggacagggacttttgtgatcttggtcgcaccccagtgcctggaacaggctgcagactcctgtagatgtgagagttctcaggggcctccatgccctgggtgttttttttcctcccaattgttgaggttttttgctgaggacagtgtttcatgccctgcttatatttttatttcaagtgtcatctgatatagttattattttcatttttcaaaatgtggtgacccctgaggattaatcagaaaaacagaacacttaagattttcctacctcttaccaattccggttcaatgtgactttcctattttgacccctgtccctctctggtgtattttcccctatccaggctccaacagagccttctttccttttttttcttttttcctttttttcttttgggacggagtctcatactgtcacccaggctggcatgcagtggtgctatctcggctagctgcaacttctgcctcccgggttcatgtgattctcctgcctcagcctcctgagtagctaggattacaggagcacaccaccatacctggttaattttttgtatttttagtacagacagggctacattgtgttggccagactgatcttgaactcctgatctcttgatccacccacctcagcctcccaaagtgctggcttcttttattttttagaaccccatcctctctaggagaccccatccagtcactctgcttccttttcctgtcctctcccaggaagttctctcctcacctgtgagcaggagccctttccaggttatatgctgtgtgcagggaggggctgagaggggccccatggtctctgctccctgcgtgttctcctctgtggagatgagcctaggatccagaatcttcctgagcacggctgtcagctgtgctgtccttcctccttctgcactgagcctcttcccggggcaggagcacttctcaagctcatgggtggggtcaggcccaggacacctctctgtcccctcctctctcagttctgcctccttgtccctccttctgtttttccttttgtctgtgtttcaggtccctgggaattgtggagccctctgcctttttcagcagtgattctttcaccaaacctcaacacacactttgtgcagacacacacacacacacacacacatacacacacacacacacacacagaagagacacacacagacccacagagtcacacacataccctgcaggttgggcaagcgcagtcctgggcctcagcctcctgctctccgcatggctctggttaggggtgcacattcacgccctttggcctctttcatccccatctggctctcccctgcagtgcaggaggctgaagctgcaccaggtccctgtcacagtgatgccccattgtgctgtgtgtgaactgtgtgtttcctggtgagagggacccttcctttctctaatcgtatctagcttggctgcagcttccaaggatggacgttcaggacctgggtgtcccagaggaaactgtccttcctagaggtgtgcagggtgaatctctcatgcctcttgggaggagaggcctgtgctgattgctcagtgggggctgtaagtcccatagtcaaagagagagttctcggtcactctttggctccctggggtctggcggctgagctggagctcaggatttctcgtgttcttcctgaccatctttgatgtcctctcttatgtgcccagctgattgtcctgtggtcaccacaccttccctgtggtggtgcaggtggcagtgaagagttacccaggaaacccgcgggacatggctcgttgagacacaggagggggagcctgggacagagcaggggttcagagctggagagattcatcctgacttactccgtggccatgatgggctcagccctccatgtgccgacatacccaggggtctgtcctgagggttttgacctggccaagctgctgtgtgtagaggaggaacaggcagtggccagagatcctgtctgcagggacgttgctcacgcctgagatggtgggtgggggtgggttgtgttctgtgtgcaaagagcaataacacccccctttccccgcaagcacacaggagaggactgtcttcccaagggacagctgggggtaggtggccacatcccagatggtgcctgtgtgtgaccatcacacacgatctaagccaccaggggttcagcgggcaggcaggtcacagggtgcctggctgattcccggggaggctgtgggcccttaggcagccgctgatctgtgtcagctctaggcttcacctgcgaagccccagagaacaggacagatggagcaggggtgggcatttagggagcagtgacagaaagagttgatgaggatggagggagttcacgaggggaaagcgcccagtgtggcgttgcgtgcaccagagctgccctgggagatgcctttagctgggcccagggaaggagcaggtgtgcggggaggagctacctgcagggggagtggtgttaggttggtggctgccaggtcagggaggagctgacagagtccatgtggggaacatggagggcgcgctgaggacttgagccgaagtgaccccggtgagggtggaccctgctgggctgtgggttccgctgagggaggttggcatcccctgggaaggctccaggctgggagggactctgtcaccctctgttggacagggagggaagtgtgaacggcagcaatcccaggccaggctgcatgttttattccatgtggatctgcacacttcacacgagatcacacatatgttatgttacagctccttcaccttccagccccgtgagtcccagtctctgtggctctacgttcactgttctccctctttcacaatcagatgtcccaaacgcagatttttgtcaccttctgtgagtttgtgtttgtgtgcagtaggcggcactgtgtataccctgggggcagtgatgtctggggctgagcagtgcacgtgggcttgggagcagaagagggagcagcagggtgggaagatcaacgtcaggggggcagggacaagtcattttcattttctcactcccagggaccagaacccaggattctgactccagggcagagtaccacaccctgcttgtgtccctggatatcatgatgctcatagtgtcatgttgccttggcattcactttttaaggtgtaagtttattggcctcaaatcagaggcagggcttgtacaccatggccgttttcaatactgtgtctggttcaagtggctccagttggtgtccagagataaaatcttagaggcatctctcctgcttggtgtgctgggttcccctctctccagctgctttctttaaactgataattctgacatttgccctcacatttaaagtgaccatctctcagtcacagcttgagctcttggtcccagtgtttgctgcttgctttgaacacatccattaaagctccctgcctgaaacctgtcagataacaccctggacctaataaagccattggcttaccggtctcttctctcctccctgcctgggctcactgaacactgtgtctgtggcctccaggtgcgccgagtgctccctagtgtctgtaagtagtaaaaatacttatattttcacgttctggttgtatcattgtagcctcacatgccatccagggcctgatattgaggctgccctatgggacctgtgctggttgagcccctgctggagctcttgttttgggacctctggttctcttggggacaggagcttccagctaacttgattgaaaacctgatgtctttcattgaaacactgggtcagatgatgtattcatgggcttcagctgccataacaaacaccttagcctgggtgaattaaataatagaaatctgtttttcacagttctgtgaataatgtgctattctaaccactttaaaatgcacaatcaggtgaaattaaccacatacacagtgttaaattaccctcaccactatttttcctagaaaattgttatcattttaaactgaaactttgtatcttttaaacaataactccctgtatgttccaccctaggccttgatcacctctactctgtctctatgaatttgcctattcttgatgtttcatataaatggaattatacaattatgttattttgtttctgacatatttcacttagcataatgtttcccaagtctatgcatgttccagtgggtgtcagagcttccttcctctttatggcagattatcattctgttgtatgtgtcaccatatttgtttattcatgtgttgatgaacacttggattgttttcatattttatcttttgtgaataatgctgcaatgaacattcccatgcaagtacctgtttgagtccctggatttaattctttgggtacatacttaggaatggatgttgtttcaaatgagaattctatgattagctttttgaggaacagcaaagctttttctcttagcggctgtaccttttcatattctcaccagcaacgtatgaggattccaaattctacataatgctgctacttgttatttaacattttaaaagaatggtagccagttttgtaggtgtgatgtggtgtctcattgcagctttgactttgtattttcctaatgactaatgatgttgagtatcttttcatgtccttcttgactcttggtatatcttctttgaagaaatgtctatatgagtcttttgcccatttataaattggatgctttctccttttgttattgagttgtagctagttttttatattatctggacatgaaacctgtctatatgtggtttgcaaatattttctctcatctgtgtatattaattattttcttgataatttcctttgatgcacaaaaagctcacatcttgataaagcccaatttatcttgtttttcttgtttctcatgctttcgtatcatatctaggaatccactggatacttgaggtcatcaatatttacctctatgtctattttaagatgtttttatggttatatatctgatatttaactcactgatcaattttttacggaattgtttgataaggtgagaggtagggttatctaaattcactgttttgcatgtggttatctagtggtttctgcactatgatttgaaaggagaattgttcctccattaaactgtcttgacaccctcttcaaagtgtaattggccataagtgtgagggtttatttctagactctcaattctatcccatttgtctttatgtctattcttttgccagcaacttgtgttttaataattgtactcctttgtgagatttcaaataagaaagttcaagtcctacaatttattttggcaagattcttttggctattcaggggtacttttttgagaggtgggtaggccaatgtttcacaattgggaaagccttttctgtcttcttcagggggaaatttgggagaacctttaagaaactttacctaagcaggtaaactgtcaccactttatttgctgaagtgctatgttaaagtgtgcattgcctcttgtggaagaattatgagaccctggaagcacctgcccaggtggtgagagacagtgaattccatgatgaggggcagagaggacattgttttgggatacagtgttgttgggggagttgtacacatctcaacttctttatgtctctgtacagtgggtgtagggagcagctccatagggtcagtgggtttttctccctgtgtgcagagacgtgagattgtagaaataaagacgcaagacaaaaagataaaagacagctgagcctgggggaccactaccaccaagatgcagagataggtagtggccccgaatgccaggctgtgctgatatttattggaaagaagacaaaggggcaggataagcagtgtgagccatctccaatgataggtaaggtcacatgggtcatgtgtccactggacagggggcccttccctgcctggcagctgaagcagagaaagagagaagaaagagagagagagcttacaccattatttctgcttattagagacttttagtactttcactaatttgctactgctaactaaacagcagagccagttgtacaggatggactatgaaggcggactaggagtgtgaccacttaagcacagcaccatagggagacggttaggcctcttgataactgcgggtcgacctgactaatgtcaagctctccacaagaggtgaaggagtagagtcttctctcaactccctcggggaaagggagactcccattcctggtcggttaagtagcaggtgtttttccttgacactgagacaatcactacttcatggttcgcctggcaacctgcatcttcccagacgctggtgttaccgctacacgaaagatccctctagtggccctgtctgggcataacagaaggctcgcactcttgtcttctggtcacttctcactatgtctccccagctcctatctctgtatagcctggcttttcctaggttatgattatagagcgaggattattataaattggaacaaagagaaattgctgccaactaatgattaatgatattcgtatataatcatatctaagatctatatctggtataactattcttcttttatattctatgataatggagcagctcgtgccctcagtctcttgcctcagcaccttggtggcttggtgcccagaagtgggcatctccgttggacacagtaggttttaaaatccttgtttatcctctggtgtctgggtcttggcttagctgttcgctgcagctgaaagaggtgtctgctaaggcaatgacacctgtggggaggagaagggttcagcagagtgaaagtagctggggctcagagaagacaggaaagtctgactctttgaaactgtgggtcagctgatgggtgtcctcaggggtacatgggccatgccagtagccactgcagtggactggaagaaggtaagggatgccgggtatcccatgttctctctcagctctgcagctgaagatttcggccctgggctggtacggccctgcagcaggggaagggtacacaggaatggctgcatatcaggaccaagtccatgtcatcttctcaggcattgttactgcagatggaggattgtgttcagagacctggcctggacacatgggagggcccaccccattctattaaaattattttaagagaacagtattagcaaatgtggtacatgttttattctgctagaatcagtcttgctgtcatattttacaatgtatctcttaggaaatggtgagagtcatccacacaatgtggatttaaaggggactctactataatttcagctttcctactctttatagaaaccatcttctctgcaaacacacaggaaatatctctgttcatttctattgggagccctgtatgtgaggtgaggtggagagtgccacatttcccttgagatgttatgtaaaagtttgaggttgagatgacatatctgacactctgttgttaccctcagaagctactacatgtgaaattctaatgactgcattatcctgccaagtgaaagaggcaggcacaagcaaggacagctaagaggggtgagagcctcatcatgatggggagtcttattctgacatcttgggaaaaactgtccacgtgtgaagtcatcaacttgttttccttgtttacagtttgagcagctgttgttatggtgttgaacattttggtgagttctgagtggctcagacatcaggtacaaggattttcccatgaaatttacattgagttgtccaactctggcttatagggcttctggaacagagtgggtcttgctctttgaggttccatgggagaagatggaattggaggaactagtagaattcagggtaatgtccagtctacaggtggataataaaaacacagaaacaatgaacagagctgcaatctcataacaggtgtactacagtattattttccacataatttttctctctatgggcatctctagttttaccaatgataatttcagtagaatatgtttgtttgcaaaataggttgagtttcttcaaacttggtctgattgtttacataagcgcagcaagagtagcaatggaccatgtaggctctcttttaaagttttctttgctctaagtttttttaaggaatctgagattaaattttacaaacctcttgagaataggaagccaaaccaaggctgatttcagactttgcctgcagttcatactggttcattctatctatattcttaatataacatcccagtcaaagccttggtaatataaccaatgatttcaaatgtgtcctgttaaaaagagagaagattgttactgtacttgtgtaaatatctgtattaccataaacatgtcaacactcaggaatagttgcccaattctggggcagtcaggtagagagcaaaagtaaatatttgaattattgttcccagaagtatagtttattgaactgctgtgagctatagatagattaaagaaaaaaaattccataaatctagaaaacaaaccatttaaagaatcagcaaattttcaaataaaaatcataaaaacattatcctcattattatcaattctttcaatgaaatcaatgtttttcctgcttggtctaggctgagaattttatgaagatatcagcctgtttcttaaagttttggaagttcttagacagtccggtggtataatgtgaaaattatcagaaacttgtattagagagtacttgtcagcatcttttccataaatctccttgaaaaggaagcaattttggactgtagctgattggaaatgctttgaggaagaacaaaaacaacatctgtgaatgacaaagattttgaatgactatggttaaaactctgatgagaattcattatgataacacagctcacataaaaagttagttacttctgtggtacatgacattatggctgataacatatttaatttctaggaatctactttttccttcggggattacattaattttgtgggagggttgctggtagatgattagccaactatattcttgcagtttttttctatctcaatgtgtttctaggttagtgatcagtcttctgtcaatttcatcctgaccatgctgcactcagatatttttgaaggctttatgatgtgagaaaggctgactgctattttctgtgtcattagaactttgtacccttttatggttgcatctttttctcagtgtgtcagttgtggtaggcatgaataagactctgtcaggtctccatggcagcttgtgtttctcaagaggattactgagttcttggtggagcacattaatgaataggaccgagaaagtataggcttatgtatgttgaaaaatgtccctaggtaattccagcactcccagctaataattgattaattaataatcaattgacttgattgacagaaggcccaaatcagtgcattccagactgacaacctactttgcatagggtcctcactttcctgaagctcccagcagggatatgaaagcaagcccagttctatgagactctgttttattctcctgggtgactggtgggaagactccccatcagtcttcccatgctctctttgaactgtagctaaatcttctgtctctttctccttcgcaggaatcagatttgcatagtggtcccaaagctccccagatttttaagcctgccccaccttccctcacagacatttttcctaatacattatcctgcatgtctaatctcatcttggatgcatctcagtgggcataaactaacataccaggcttgatttttttgcacttagcttttttctgtctctcccacatgtagccagtaaccatgtcctagtgttttatgtgttacctcttttttcatgtttatagggaaaaaatatgtttccatatacttatttatatgtaatatatataataaaatgtgtaatataaaatgtataataatgtaaaacatatacacattttccatatatgtatatggaaaaagaggtaacacataaaacaccaggacatttacgtataataaaattgacataagttatatatgtatgtagtgtctggtagtcttaccctctttataaatacacactttctatcactgccccttccttccttcccatgtagagctcccatggccaaatctccctatttctccaagtttgtgtcactcactgtcctctgtgctgtgtcccatgtgctgtgtccgcagcctcctagtgttttatgtgttctctgtttctatatatatatggaaaaagcatatacatatttctctgtgtatatttatatacaatatataataatataaaaatatagaatatataacaatttaagatatatacatatttccatatctatgaaaaaaggtaacacataaacactaggccatttatatataaaattctcatatgtaatataaatgccaattttatcatatataaataagtatatacactatagatttatcatatataaggtgaatttggaatgccctgacctgggccctctgtcagtcaagtccttgccatggaggccattcatggctgccacaactgagacaccgagagaaagatgcaactatgaaaaggtgaaaagttctaaagtcatagaaaacagcaatcagcctttctcatatcccaaaattttcaaaaatatctgagtgcagcatgtccaagatggaattaaaaacttcaatcttgaaaaggaaaaaggaagctggaggattcacactttcagatttcagcatctactgcaaagctacagtaatcaatacagtgtggtactggcataaaggaggacatagaaatgaatgacatggaatagagaacccagaaaaaaagcttgcatatatggccaaatgatttttgtcaagagtgccaagaccattccatggggaaaggacagtctttttaacaagtgatactgggaaagctggctatccatggacaagtatgagttgaacctttacctcacaccatatacaaaaaatgaacccacaatggatcaaagacctaaatggaatagtgaagactaccagactcttagaagaaaacataaggaaaaagcttcatgatattgaatttcagaatgatttattagttataactacaaaagcataggcaacaaaaagggataaattggacttcatgaaaattaaaaacttttatgtatgaaaggccattatcaagaatgtaaaaaggcaaactatgacatagggaaaatatctgaaaatcatatatctgataagggattaatttccagaatacatgaagaacactacaaatcaaaaacagcaaaaatacaaaagcccaattaaaaaatggacaaaggactgaaagagagattttattaaagaagatatacaaatggccaatgaggacatgcaaggattctcaatattactaatatttagagatttgcaaagcaaaaccacggtgatacatgacctcacacacattaggatggctttgataaaaacaacatgaacaacatcacaaaacaagtgttttcaagtatgcagaaaaaatgaagctctttgtgtattgctgatgggaatgggaagtgttatagccactgtggaaaaaatggcatggcacggccggctcatgcctgtaatcccagcactttgggagctgagatgggtggatctcttgaggtcaggagtttgagaacagcccggcaagcatggtgaaaccccatctctactaaaaatacaaaaattagctgggtatggtggcatgcgcctgtaatcccagctactcaggacgctgaggcatgagaatcacttgaaccttggaggtggaggttgcagcgagccacgattgcaccattgcactccagtctgggtgacagaggaagacccggtctcaacatcaacaacagaaaagaaaatggtatgtcagtttcttaaataaattaaagcattaccacttgaaccagcaattctacttctggacatacagccaaaagtattgaaaaatatttaaacaggtatttgtacaccgatgttcacagcagcatcactcacaatagccaatgggtggaaacaaccaaaaagtctattgaaagataagtggatgaacaaaaagcaatatccatactttggaatgttcttcaatcttagcaaggtataaaattctgacacatggtgcaaaatggatgaaccatgaagacattatgcaaagtgaaataagccagacacaaaagcataattattatatacttccatttatgtaagatagttagaatagtcagttacttagagacagaaattagaatggtgattaccaggggttaaggggaggaggaatgagagttatcatttattgggttcagaggtttagtatagtaggataaaaaaagctctggaaatagatagtgttgatagtaacacaacactaaattgcacgcttagaaacagttaatagtaaatcttagatgtatagtgtctggtactcttaccttctctataaatacacactttttgtcgctgttcctcccctgccatagggagcttctgtgagttaatctccctatttctccaagtgtccatcactcactgtcctctgtgctgtgttccaggagctgtgtccacagactcagacaggcagtgacttcagagccaggacacagtcctattcccattttttaaagccttacccatgggaggcttggcttctactggccactcgatttagccagattcagaacaggccaccgaggcaccttatccacatgccctggccccagcccgggtggagtcagggcaggggcagtcactgggtgagcccacagcaatgcagggagcagtgtccgagctgcttctccctcacccaaggggcttcctcctctcatttggggaaaagtgtgggcttgttttgaagcctctgatgttcattgcagctcatggtgtacacacacacagacacacacacaaaggagacagaagggatgttttggtgacagaaacagcttgaccatgaggaccctcctctttctccctctgtgaaggcccttatactgcatagtgcttggggctgataaagccatttccctacatttctcaggctggacccaaggtcatccaccagaaatccggaaaacaaagggaagagaatctgtagatatgaattgggagtgttcaggagaaaaatttgggatttacttttgtgcatgggacacaggctgagaataaaaatgttttcctggctctttcttggaaagccagataggcttcacctgaaagcatattgccaatgctccagtgatccacttacaagggactctgattttcttggttgcgaagtttttgccattagtgactgggttatggacataacacagatagtccccactattttcagtagtgacttgggggataaagagctcttgtcctatttgttggttattcccattcagcagccaagaatactctgctgatggattagagcccgtgaggcaggagaggttgaggtttgaccctggatagtaacaggtgtctgaagaataagttgtgggttcatctgggccatctggagcaaagagaataaagccacaggtaatgttatcagagggaatgggaagctcctggtctgtgaaaggggcatagtgttcctttttgccaagtcacaaccccgaagtcccagccaaaacttcctctgtgttcactgaactggaggagtcaacgacattcacctgtttctcccatcgcaagctatggaaccagagtcccctaagaccggagaagcccctcccttcctgggcctacccaggtttgcctgggacaggaagtcatggccagcttgggggtccaggggtaagtgtcttcatacttggacctgagagggactgagaggcctggcctcatgttatgtggatttgggctggcagccttgtccatgaaggaaaagaggatactcacagagaacatccaggagactgggtcactgtggctggtgctcactatattcttcctttgacgttcatagagtcctttgtcactccttgtgacactgagtagagcaaggatcctgttatcattggacatctttagcctgggactgagtgtgagtctatgactatttacccaccacatgtagattgtgccatgagtctcaggttcacaggttaagaccacagcctcctcatcctctgcggagttgctggtgacatagggcttgggcagattggctgtgcagataacagagaagattcccctgtgtggcatcattgatttctccatgagcgttttccaataagagttgacatctcccacctctcagccaatccaagtccttaaaagcccacagcaggtctgtgtgtcaaaagacagatggatgcatgatgatctgagggctcagaggccatggggccacctgctctgtgtgcaagatgcacagacttctgaagtgtggatcgagcagcaatattggtgaagtgtgaattgagcagggtcaaacaattagagtttgattaactttgtttaaattgagaagagtccaagtgaggcagcagtggctcatgcatctccccaactgaaggaccccaccttataacactgttgttattatgaatacacaggtgtgaatgaaacaggcagtaaatcagacagcacccacctggccagctccacctggtcctaagaaccaccagtattcccattatgtgtatgttacagctttttaggctacaaaatataaaatacaatcacagaatataaaatatgctactgtcaatacaaaacattgaatatgaagctgaatatgttgttccactttttctcactcttgttaaactttgctgtttcagttttggaagtttctattgacacacacttaagctagagattctttcctcagctgtgtgcagcctacgagtaagcccatggagggcattctttatttctcttaaagtgtttttaatctctagcatttcttttgcttctttcttagaatagccatctctgtttaaatcacccatctattcctgaaaggtgtctccttttaaaatcataatccttaaccagagttgttttaaatttccagtctgataatttcaacatccttaccacatctgtgtctggttccaatccttgctctgtctttcaaactgcatttttttttttttgccatagtctgtcttgtatttttttgaaaaccacacatgatgtactgggtaaaagggacttgagtgggcaggcattcagtgacacggtggtgagtgtggggagggaagggttctgtggttctggatgaggtctgtgtcctgggctgtgaatgtcacaagtgcccctcaggtttttctttccattaggtgggatatgatgacttgaggaggctggagttggatacttcccctccctctggccagttaagctcctatcaaaccgcagctaattaggctgcagtgaaatagtttctcttaaatgtaggtcttaccaagaagaatataaatcactgacaactttccaagtgtttttttcccttcttccaagaagaaggatgtggattcttttttgatattgactgtgagaacctggtagagctccaggagctaaaagtcataaaactgtccccctactcccaagactaatccatcctctggtttgtttatctctgcgctgtgtccacactgagcctccagaatttcctgaattacagttcaggttttctgaaccccagcactggttcccgctggggtttctgtgcctgtgtttctgctcaggtacggtgcgctgctctgtatttgcctgtgggtctctccaatatgtgggccagttagcactgagaccttgcttcctgagaaatctaaacgagttgttgatttttcagtttgttcagctttttacttgttgttagaactgagtgaaaatttttaagctacttacatgcctgatggaaattcgaagtctctagggcatgacaggaggatatgagccccacagcaggttgaggatggagtcatgagtgaaatgggtgaaatgagcccacgggctttggaaactgcagatctgtccttctgcctctgaccccctggtgagtccatgtagaaagtgaaaccacctttgcaaagcatatgatggtgagaggaagctagcttggctgaccgcatctcacctctagcctcaaacttgctctctttgattcctgggcataggccagggtaagcatgggaggaatttatagtttaactttgaagcaaggatgataatagtccctccctaaaattagctcctccttgtcgggggctaccttggtaaatctaagaaaaaagattgaatggtctcatgattcagcaggttgtagagtaagcatcattctggcatctgctcagctttcgaagaggcctcagaaacttgcaatcacggagtaagccagtggtggaggaagacatcttatataatgggagctggaggaagagagcaagggttgcacactggtaaacaaacaggtaaaaactcacttttgctacaacagcaccaagaagaatggtcttaaagtatgagaaaccacctccattatccaatcacattcaaccaggctccacctccaactttggagattacaatttgacatgagatttgggtgggggtaaaggtccaaaaaattattattatttccatggtccctcccaaatctcacatctttctcacatttaataatatgaggatggcttcccaacagtctctagagtcttaactcattcagcattaactcaaaagcccaaaatagcaagtttcatctgagacaaagcaagttccttttacctatgagcctgtaaattcaaaaacaagttagttactttcaagacacaatggaggtataggcattgggtaaatactcccattccaaagggaagaattaggctgaaggaaataggatacaggccccatgaaagtctgaaagcttgcagcacagtctttaaaatttaaagctccaaaataatctcctttgaccccatatctcatattcagggcacactgatgtaaggcttaggcttccaaggttctgggaatcacagaaacattccaagagagtgaaaaaagaatttgtagtgtggcttttgatgctaaacagcgtattagactgagtaagtcactgaagagaaaaaagtcagaggagaagatgggtgagggtgacagaaatggaatggtgaaaggaaaggtctgataaaaatgtttaccggctggacatggtggctcacacctgtaatcccagcactttgggaggctgaggtgggcagatcatgaggtcaggagtttgagaccagcctgaccaatatggtgaaaccccatctctactaaaaatacaaaaattagccgggcgtggtggcatgcacctgtaatcccagctactcaggaggctgaaggcaggagaatcacttgaacttgggatgcggaggtagcagtgacctgagaacgcagcattgcactccagcctgggtgacagagtgagactccatctcaaaaaaaaaaaaaaaagtttacccaagggctcatctggtacctggctctgtgactaatgtcttacacattttgatttactcttccactttcattttctgatgcacaaagggtcacccttctgctgaagatgagaaaagaggatgagggagctcaaatgagtggtctagagtcatccagctacttcatagagcttgtgtgtttcaccttgatgtttgtgcacagacagaaaagtgagacacagaaggaaggcaaagcaagtttatgctgttggtgacacttatgaaagttacctgtgttggcagaataatggactcctaaaatgtttgcaccctagctccagaacctgtgcatttacttttcttggtaaaaacacagtgcaggggtgataaaattaaaatcttaagatgtggacgttgttctagattatctgggtgggcccattgtaatcagaagtgtccttgtaagtgacaaagaaaagcaggggcatccatgtgagaatgatgagcctgtgaaactccactggccaatgctgggtgtgagcatgcatcaaaagacaaaattacaactaatgtagttatagattttatttttcatttattatttgaggcagctctcactctacaaatatagtgacagccctccctgggctatacaataacaaaacagtgggttttgtcaagtgggaactggtaaacaaagccatataaataaataaattggtgaacttcaggtctcttttctgtaaaagttaaagcagaggaaacttttattctgctgtctcaggtagagtggaacctcctgttttcaacaaaaaacaaaagtctgttctggtatctctttgcttcattaaaatttcagttgtagactgtagcatttagcatgagtggttctattttggagtctctaggctctcacttaggtgagagtgtgaccaaaatttaaagcattggcattcatctcagtaaccatcatattgggcttccatcatttataggtttatgatgtcttcctgatcacacatttctttgagtttttgtcatttcagccaaagagagaccctttggtatttgttgatggctgcacacaaaactttttaaaaacttttgtagaattcaccacaccaaaatgtagaatttaaaaacctatagaatttatcacaccagagaggctactaatatgactattaggaggataacaccaaaagtttggagtatgcactttaggcaagatgcaaaccaactaaaatagaataggtcaaagaatgagccagaattgtctagcaattttaaccaagtagtatgtttggtaacttctgtgattgagtcattattatactcgatatatttgtttatgtgcaacagtcagtgtcagaaactgcacaggctcctccctctttagctggtagggaacaattttattatgtagcattcaatggctcattaaattaaaacagggagtgagaacaagtgagtctgaaaatgtaactttaaaagggaccactgtacatttgaagaaacaattgtgttaaaaatgctgctaatgtcagccattgggtggactaaatgatatcttatgtaaaaatttgagggtgacatgatatatctgtcactctgttacgctactctcagaagctacttcacgtgagattctaatgataccatcatcctgccaagtgaaagaggcaggcataagcatggacaaattaagaggggtaagagcctgattttgatgtgaagacttgttctggcaacttaggaaaagcttttcacagtgtgaagttgtcaacttcttatcctggttttaagtttgagtgtctgtagttatggtgtcaaacatattggtgagctccgagtgactcatacttcaggcacgagggttttcctgtgaaatttacattgagctttccacctccagcttataggacttcagtaacagagcagattttgttcttactgattcaataagaaaaaactggatgggaggaactagaagaattcagggtctagtccagtctaccggtgaataataaaaactcgaaaacaatgaacagagctgcaatttcatagcaggtatactacactttttattttcaacattatttttctctctataggcatatctatttttaccaaagacaatcccagtaggacaaatttgtttacaaagtaggtttagtcttatgaaactttgccgggattctttacataagtgcatcaagagtagcaatggaccacagaggctcttcctaaagtttggttcgctagaaatttttataagtagtctcagattaagcttttacaaacctcttgagatgaggaagccaaatgaaagccatcttcagactttgcctgcagtacttatgggtccattctatgtatattctcaaatataacatcttagtcaaagccttggtaatataaccaatgttttgaaatgtgtccttttgtaaagagagaagattcttactagtgcaaataactgtatcatcataatcatatgaatactcatgaatagtttcccaatcctgggacagttaggtaaagagcaaaaatcaatgggcttcaattattgtttccaaaagtatactttgccaaattgctttagatatagctagcttaaaagaagaaaaattacataaatctggaaaaaatcatttaatgaatcagcaaattttcaaataaaaattataaaaacattatccacattatttatttcaatgaaattatttttgttctgcttggtctaggttggcatatttcatgaaggcatcatcctgtttgttaaagttttggaagtctatagacggtccagtgatataatcttgaactgctcagaaacttgtatgcaagagtacttgtcagtatcttttccataaatcttttgaaatagaagcaattttggactgtaggtgattgcagatgctttcaggaagaatcaaaacaactatctgtgaatgaccaacatgtaaaatgactattgctaaaactctgataagagtttggtataagaaagggagtaactccagccagtactccagtcatgacgctgacaggggccccaactgagagaccaaaagaactttcttatcctgaagcagctgtcatggaaaaaaaaagaggagaaggaataaataataaagacagcaaggattttagccaattaatttttgagatagggtctcactctgttgcctaggctggagtgcagtggcacaatctcagctcactgcaacctgtgcctcccaggctcaagccgtcctcccacctcgctctcctgagtagctgggactacaggcacacaccaccatgcatgcttaatgtttgtattttttgtagagatgggcttttaccatgttgttgaggcttgttttgaactcctggactcaagttatccacccgccttggcttcccaaagtgcagggattacaggtgtgagccaccgctcttgctgctttcatgctttttataataagaatgaactccttatgtaataataaataaataaatgaaattatttgctttggatgtagcaaatgtagacttagattgtccagagtcaggagctaagcctcatttttttttgttttagctcagtgtagagtgcattgaaggtgtcctaaaaataattccatatagtaagccaattttaaaccctgctcacagctaaatctgccaagtatgagccaggtaaaattaccaaaaaaggtggttctgactgattccttaacaataacgtggcttacaaacaaagactgatatgaaatagttgatccaacccaaacactttgctcatttcccaaaattttctatacaaacatatacaacttaccacaacataaagatcataatgaaaagtttgccttttattcctttaaatgaccatatgtttagatctgatgtactgacagcaataattctcctttaagcggaaaactaataaaatttgaaaaatagtgattttatatttagatgatactcagatcttctgctacgtatgtggaaaatggaattattgctagaaacattgtttaaagattagggtatgaaaggagtattaggaagtcaggaggttctttctttaggaagcagcttatctggattcattcaaagagctttaggttagtttgaggtctttctgcaaaatgtaaattgctatatgagaaactatatatagtccaatgatgaaagaatgcaaagccttagaagcacaggcgacaattccagtatcttccctaaagttctgacaaaaaggaaaataactatcaaattcttcaactcgaatgcttattatgtatgtataagtcagttgtcagatgaagagaggctggaaatatgacttctacccctagggaactcacagtcttgtgggggccactaggggtggtggtgtgacctgcctggagcagggctaagtatggacttgtgagtcaagggctatcaaaacctaagtaaactgattgctgttcagagaaggtagagttccatttcacagtttgcaagaaggactatttcatggaggaggtcacgttggactagacctttaaaagttggtagaatttaaaagcaaggatatggaagcaggaagagtgaaagtgagcagaggtacagaagtgaggcaagggtgagcagttttaattttttaatggtggtattataaaacacacatcaaaatttgccatattattattattattttggagacagtgtctggctctgttgcccaggctggagtgcagtagctcaatcatggcttactgtagcctccacctcctgggctcaagcaatcctcgtacatcatccccctgagtagctgggaccacaagcatataccaccatgcccagctaatttttatatttttgggagtgacaaggtcttcctatgttgcccaggctggtcttgaactcctggactcaaatgatcctcctgccttagccccaaagtgctgggactacaggtatgagccactgcacctgaccccatcttaaaaatttttaagtgcacagttcagaaatacatttgcattgtgcaaccatcagcgccacccatcttcagagaatatttttcatcttgtaacagggaaaattcatatccatgaaacactaactcctcattcttcctcctccccaccccaggtaaccactattccagtgtctctatgattttgactgctctagggacttatataaatgagatcatacactgtgtatctttttgtgactggctgatttcacttagcataatgtcctcaaggttcatccatgttgtaacatatgtgagaatttttttccttttgaaggctgaataatatttcattgtatggatagaccacattttgtttatccattcatctatccatggacacttgggttgccttcactttttggctattgtaaataatgctgctataaacatggaggtaccaatatctgtttgggtctctgctttcaattattttgggtttatacccaggagtggaatggccaagtcatacagtacctctagttttagttttctgaggaaccaccataatgtttttcacagtggctgcaccattttaattcttatgaatagtgcacaggggttccaatttttccacagtctcattaaaacttattattttctggggtttttgctttgtgtttgagagtagccatttaaattggcataaggtataatttcactgtggtttatattttcatttccttaatgattagtgatattgatcaatattttctatgcttgctggccatttgtacatcttctttggagaaatgtttattcaggtcgtctgcctattttgttaaattgggttgattttttttttctgttgtttaggtagagaaggcaatccttgaataccagtgatgtttcactaatgctgggccattgatttcacaagaagttgtatgaggtattagaatgtgtgtttggtttcaatcatggctgaggttgaatgccttttccaaaattcagtgtgaagccacaaaggatccaggagcaagaacatggtgtgactgctctctgctaaagaatttcagcctgatgacagtgagcaggctacacatgagactgacacaagaacaggtggaaagggagaccttccactggaaaaaggtgattctaacatgcagaatcaccttcaaggagcaagtaagcagaaaaatagacaatggcacagtggccaggcaagaagacactaggtccagaatctgaggttcaaatcctggctctgtgagacaacaacatgccttggtttcctcatgctactgaaacaccaggggttggggctaggtcccattgcttgctgcacagaaagccaaccactgagacaatgaacattgccagggaagaaggctttatttggctgctgcagccaaggaggtgggagatcagtcttaaattcatctctccagccaactcaaattggatggtttatatagcttggaagggaagtaactacctgcagggaaaacagcaattaaggagggctaaggaagcaatcatgataaatgaggagtctggtgtctcattgtctgatggtgatgtggtgagtttcagtctcttgcctgaaggtccgtttcctaactcagatgactgacaaatgttaagtttcaagttttaagaccagatgggtcaatttctatgtttattcaaaaaccctgtaaatatcagttctatgtggaacttgagctggtttgcccccagttatcacagttagggttaaatgatgcaatataagtaaaacaccagcagtttctgacacacacacagagtgcatgacacaagtggtgtgttgggacaatatagctcagtgaactccctttgtctactcagttatattgagtgatgaggcatctctgaagatgccactttgctacttctcccctgataatttcaccagatccagccatatgagcactgcaagtggggacttagcttaaatcattcctcgtatttcctgtgcaggcaaatcatttggcaccaaaacaggcacagaagtccaagtcctgctgccagctccacgactgatgacacagacagactttgggattagtcctttaatctctgtcctctattaaatgaaggtcatcatgctgctgcctaatgtaaaaggattgtggggattttcatcattcattaccgattatcttattctttgaaaccccaagaaaactatacaaattccaaagtctaataggtacacaagggctttattatggatgatgaaatttcaaaggatgctaaaccaaaaaaaaattgtttttcttttttgagacagagtcttgctctgttgcccaggctggagtgcaatggtgcgctattggctcatggtaagatccaccattctcctgtctcagcctttggagtagctgggactacaggcacccaccaccacacccggctaatttttgttgtatttttagtagagacggggcttccccatgttagccaggatggtctcaatctcctgaccttgtgatcagcctgcctcggccactcaaagcactggcattacaggcatgaaccaccgcacccggccaaaaaaattttttttaatgcgctctcttttccatataatcccaaggttggtgaatcacctctaagtcaggagtttatcttagctgatactgccttagtgttggcacaacttaaatttagttaaactaatatttgcatgatctttgcacaacacataaacacccaggaacaggtggtgctcctcggtggtcaacaccaggatggctatggcagggcacattctttctctatagcccaggccactggcattcaaagaaatatttttcaatgtctgatttttctctggaagtaggaaaatgctttcctaactgctttacttataagggtgtttcttgctaattctgtgcccagagtaactaatggggacatagacatagacatcattcaaatggcattctctctttaccataacccatgctttaaaatgaaataaactgaacccatgccttaagacgacaatcaagaaatacattctgcctaaggaaaagtcctgcgttcaaaggtttttgtccaaataatctgacattgtggtcatgaaacattgaaaatagcatttggagcagtaagtataaaaatttagaaggagtaaaactacttgaatgcttgttgggaggtttacaatgtagtcaaacaccagttaagcaaaaataaaatttactacttaactatttacattttctaatgtgtggtttcatggaattgttgagataaaagtagatactgaaataggagtacttgaaagtaataagacagagatttttataaaatcatttctgacctgattaagaaaaatataatctctatcacatatgaaataaacacctttagaaaaatgcaatgtcaaagaaaacacttggaatggccaacaaatatctactacagatagaaatgaaaatatttatgttatgtaaatgtcgggtatcaaattgtctccgaagttgccttctagagaactttgtttagttggtatattcttcctatgaatcaaaggaatacagtgttacgatcataagtcatgagggacatgagacaattttaaggatttaggaaagtagggaagcagtgaggtgaagggtaggcagatacttcagagggtaaaaagtgtttttgattcaaaagaaaagctaaggtagtttgaagaaaacatgcatcatctactagttaatctggggtacaatgaaggtggtgttattttaacagtgttcagaaaagaccaattaattctgtggccatacagaaagaatggaaagattgcataaaacagattctgaggaatacaaatcaatatagcaaggaactttatgatgaaggacgaatgtgagcatagaatgcactgtttttttaattattattattagcagcatcattggtttggtgatgttacctacttttggagtggagctagatatgagagctgcatgtcccttgaactttatttggggtaaatagtgaaaacaatatctatgatgagttaatggctgcagcacaacaacatggcacatgtatacatatgcaacaaacctgcgtgttgtgctcatgtaccctagaacttaaagtataataaaaaaagaaagaaaaccatatctaaataaaaaagaaaacattccagaggtgcagaattcaagctagaagaattgtgtccttggatgtcccaaggtcaaattttaatatgtcattgaatgaaggttccaatgtttggaataatgaaaacagtcatattgaattttgtctttgctctcctccctccccagtgtctaccaaaaaggctgagtaaacattcatgcaagtcaatacactgtcacagccacaattcatcctagcagtctttcctggaatagtcacttaagacgtatctggtgaggacccactggcacttttagagcaatcagaaaatacctcaaattgctcacatctagtgtaggagaaggctaatccatccctgtttcatgaagcatcacttcaatatcctggaacagtcattctacccaaatcttctgtccctagagcccaagactctccgcatcttcatccattcttcacggggcttgatttccaagactctctaccatcttggccacacaccatgttacgcattcactatggacactgcaccactgcggatgctgcaccaagggttctgaatccaagggcagattgttatgaacagcccctttaaaagtcttaaacgtgatacactggtctgtcagcagatgtgcagagcctcttatgggagacacagtttttgactcatgtgattcaatgtccataaatctgcatccaaaagatgcccatagagacaaagagcagagtaaagtccttgcagcagtgtttctcaaacttagccacccaccagaactgcctggggaactttgaaagatacccatgctgaatcccacccaccaagattctgatgtaatgctatggggtgagatctggacatcaggatgtttggaatctccccaggctcatttaacgtgcaaccaagactgaagcccactgtcctcagcaatgtgcccagcccagccttcctgacatccccccatgggtacaggatgacagtttctcactctgaccctttcctttattcaatacagcacagcacaatccaacagggtgagcactgttatgacagagaacctggagtcggatctgattaaatgtcttcaacaaaaccagtgccaagccttggccattcagctatcaattactattttcaacccaggttctaaaggctcttcattagaaacttctcgggttgataatgattgggcaaatgtgccctttggatttgattgctaccatgattattaattaactgaattgtagagatatcgagtacctttctgcctcttgtttttaagaacccatgagagacaaggccaattgcagacaatgaggacgtcctcatgatagtgagatgaactgcctagctatcttccgatatcgttacttcccaccagttttgttgcttgcaaaacaacagaatcttctctccatgaaatcatggttatcagttaggaagtagcccacttggttctggatttcgtttagagatttaagatagtaacagagggtgcaggatgacaaacagaatttgtacactgtgtctggtagtggaaaatacccaacattgtactgtatgctgactctgtcatttcctgccttctctcctccttttctccctccctcactccctccctctctccctccctccttccttccctcatgaaagcatagcttgtttgccattctttcctccagtcaccagccatttacttatgcacatcaccatgctcatgccattaccaggggactttctatcagcatgaagacaagaaaatgcctggggcagaaagggtgtggggagcaggcagcacccctgcaactgcccggtagcatttatacattgctctcccaccttggtttctatccatagctttcctcgtcagagcatgttcactttaacatcctctagagcaatttcttggatccttcaagggctcaagaactaaacataagttcaaaagaaactgagtaggcacctaccttctggaaacaacatccatagaaaagacttgattgctatggtctgatttatgaacctgtggctcatatcaaggttagcatttgcactagcattaaggtattttcattgagataatttatgttttgaaagaaatactacaagatcaagaaactgtatcagttggagaatagaagtgtgtatgatttgtgtatataaatatgcacatcaaagcatttatttatttcagagagttgtataacaccatcagagtaaaaattgagtgattctcttctatttctgaccctacttccaatgtcttctctgtccctctgggcaaaaccatttaaaccttttatcttggtttcctttgtgagaaaatggggataatagatacccctgagccattctggagacatgtttggatgccagcccagttatatgattataggagaaaaaagctttgagcttttggcacttaggtgccacataaagattattagcaagctgctgaggttttatctttggaaactaataagcatttctcctctaaagcctcaaatctttagcccctggacacatgttcctgatagctctctctttacaaagatccccttggctccacaaggatacagatagtgctttgctgagagagtcactaccgcacattcagatgaaaggtattcattccgcttggcagagtcatggttagagtagctgctgatcccagcaaggcagggtgggtgatgggaagggattagattaggaagaaaagggatcctctcattctctcactgagaggactttaaacctgcagaagcacaacagtgagtggactacgtgtatgtgccaacgtgcaaagtcgatggtgcacacgttacaggttggctcgagacgatgccactcagacctgagtgcaccgtggaactctcttgaattctctctgcaaatgggttgccctggatgtatagagttattctacaggagtcctgctcctaactcatcagaaacgtaatgtcctctgttgatctcaaaggcattttcttctgttaaaagtattgtccattcagcaatatggagaaagatcatttgtgagaataaaatagaagtgtctgatggtagtggggggggtgtaatttcctccctatgtgagtagcattaagttcactcttaatttttttcttcatttctgtaattggagactgatttatcaagaggatatagaattcagtgactaattccattaaatgctgaaagaataaaataaaagtagaattcaaaaggcttactcctgattagttttcaagatgtgtctaggtacaggaagttaaaaataataccacagtgaatgctctgacccagtgctaacaaaagcttcctttttttggtgagacttggcatagaaaatcacacatgtcattcagtggtcctgaaaaatgatgactgagatttggactggttttccagggaataaaattgagtgactttttaaaaagttctactcctagaatctgggatctaatcaatccaatatcaacttcaagggaatagaccaacaaccagagatgaaattagaagaaaaataattagaatagcaagcataggctggttttccatgctatgattctgcagcaaatgtggtaatttgggaatactgatttgggggatctcttgtcatgggaataagttgtgttttgtcagctttgctgagtgtctccggtgagctaaaagtgattaaaacagagtgctggccctggtatgtaagctgtaatctatactccatatctaccactagccattttgaaggaggagagttccctgatccatctcacatgatgtgcaacaggcgtgtggctcgcccgcttggttgctcaaacccctgatgggagatggagcacacagatgggcaggtgcaggggctggagtgagtgctttgggctccagcctggcagtagtgtctggggagagggtgttcctgcagcccaagtctctttagtcttgctgtctgcaaatggcttaagtgttaaccggctcaatagaccctctgccttttcacaagggcagagggccagtgtgacagctttctgtattcccagcttttgcccagtgttctagaagaatcgggtcacacacacaggcttgaaggatgaatgtgggattttattgaatggtggaggtggctctcagcaggatggatggggagctggaagggggaatggagtgagaagatgatcttcccctggagtttggtcatccagcagccaaactcccctctgaccacccccagtttaactcctggcattcacacgttccttcccttctctctttctctgctgtgtcatctgttgtttgtctgcttgtctcctcatctcctcatctgcttctggagcctggggtttggggtttatatgggtacaggatagagggacatggcaggcaagaaggcaacttttcccacttagggccacgggtctccaggcttgagggtggggcctttgctggggaactaccttctttacccagtatttccctgtctcctgtccatatcaatttcatgaatgtgtggtcacaacatgaacccagaatttggaggttggaaagtaggagtgaatgcactcaatctaatagggtgccaattcgtagcatctaatttggtaatgatgaatgagtaatagaatcttttggtaggggcagacttggtgaatcttcaaatgtagcaggattttaaaatgaatcgaatactatctctcagtcaatacaattacctccaccactcctcagttcctaattcaagggttatattttcagtaactttatgtattcaaaactgtattagatgctggaaatacaaagatgagtcagacattattaatctctgtccctaaaacgatgaaaactagtgtggaagacagccaaaaaattagagattaatcttatctagaaaattctagaaacaggatgaagcacaacagaggagtattttaggcaacctcaaggcatttaacacaacctggagcctttagttaggttagaatatggccaggaaccggaagtcaagattcaacaaattgcaacactgcaataataactaacatcactttctaatagtgtttatagtgttttctaatatgaaatcaaaatctgtctttggataacttttactcactccctggtcttgtttctgttctctgggatgacacagaatatatggaattcactcttactctgcttagtactgagaaagcaaaaattaaataaggcattcaaaattcttgtctgtatatgggccaagggaaagcttccccttcaccctctgaaggtttgctgataaccaactgacaaaaggaagattcacaggagaaaaagcttaaatatttatttgatcacagttgtatatgacatgagagcctttagaatgaagacccaaagatacagaggaaaccgtccatttttatgcctaggttcaacaaagtatggacagccatgtagaaatagggttggattcttcttggcctctctgagcagtgcttcttccttctgggtgtgggaaaaattcaccatattccttaggtcccttcaaagtcccctctattcactctatttcaggaagggtgagaggaccaatgaataaccaactttctggaaagggggtcttaggatctacagtcaaacaaagtaggtcaggtcatttcttcttttgttttctcttttcaagaggcagggtctgattctgtcacccagggtgaagtgcagtggcctgatccatggttcaccacagcctcaaattcctggactcaagcaatctgccagtctcagcctctgaagtaggtatgactacaggtgtgtgccaacataccagactaatttttaaaaatttttgcagagatggagtcttgcagtattacccaggatggtcttaaactcctgggctcaagcaatcctcctgcctttgcctcccaaagtgttgaaattacagatttgagccaccacacccaacccagataatttctgtatggccagtttttacacagaaaggtagagggaaatttagagtccgatttttaggttttatggctttggggaaaaggggttctggtttctaggacccgtcatggggaagagggattctagtttctaaggtgcctccagggagaatgggactcagagacaggaaggcagaagaagctcagagagaaagttttgcttctgaggctctttcagaaggattccttgagctcaggagttccagaccagcctgggtaacatttcaagactccatctctgcaaaaaattttgaaaaaatagcctggtatgtggcatgaacctgcagtcctaactacttgagaggctgaggcgggaggattgcttgaggccaggagtttaaggtgtggtgaacttctgaggctttgattttggggtactgctttctgagccttagacctagaaccagtattcaggtcatgggggaagttcatataagaatctctattttttaactatcaaactgtgacttccacatgggccacttgggaatgctctcacccatagacctgtcatacacctttgttgggtagggacaggaaaagagattgagtagcataagataaagtcctcccgaccccacccatttcaataatgggatccgcatttatcatatgcagatctgagacccttcctgaacttcaggattcatacagtattagagagtggtctatacctttccccatgacctccagcccacacgaggttcagtgaccctaatgccacggaggccaggatgctgtgattaagatgagagcaggggtaagaagggtcttttctctgctcatggagcactggaaggaagtatctttttgggtgctggacagtggggaggtcaagactgtgggcagaggaacactggagccaatgttgggaataattctcatgcaagcaaagacgtggtgtttagctggtcacaaccccagaccttgagactccagttccacaggggtccaggatattgtttccatgtacaagatccatctgtgagaatccagtactttccaccacctgccgtggtatggctgtggtcccatgcaccatcaccttgcgcttcaacttctgcaatgaccccctaattgataacctggctcttgacttgaccttacagcaaacattctttttgaagaaaagtcacagagcttcaccccactggccgaaaccctccactattagctgccactgcacacagagtcgaagcctaaggcattgcacttacacattttcatgttatattgttgcatagatgttgttagtttctgagtagccaggagagcattttttctgcaattaaacatatcgaatgcaccacattctttaggtcccctcaaaggcccttctattcactctatttcaggaagggtgagggaaccggtgaataaacaaaggtccttgctttaaaggctgttatgaccataaagtctgtgtatttcacagctcatgacagcagcatcctgagatattatttattgtcaaacttctcttctcaggccacacatcccattgcaatggggaatgggacagagcaaattgcaagttcttggttctatgttccagttgcaatgttgctttcagttttcctgctgttaaaacagcttttgctggtaggactgtgggaagtgagaatagatttcattttacctgctgtgcatcagcagaaaaaacaagtctttcttttctcctagcagctgagatttctcagagttcttcctagaattggatgttatatatgatctactttactcatgccaaccggcatacacaccaaagcctgatgagtggtacaaacccacccaatgttttcccccaaaacagaagtaacataagcccatgtggaattgtcagaggtgtttgaaccagagcaactgcatcttgaataggagcagggtaaaatgaggctgagacctactgcgctgcattcccagacagttaaggccttctaagtcacaggatgagataggagatcggcacaagatacaggtcataaagaccttgctgataaaacagtttgcagtaaagaagctggctaaaacccaccaaaaccaagatggccacaagagtgacctctgggggtcctcattgctacactctcaccagcaccatgacagtttacaaatgccgtggcaacgtcagaaagttaccttatatggtctaaaaaggggaggcatgaataatccaccccttgtttagcatattgtcaggaaataaccataaaatgggcaagcagcagcccttggggctcctctgtctatggagtagccattcttttattcctttgctttcttaataaacttgctttcactttatggactcgacctgaattctttcttggtgagatccaagaaccctctcttggggtctggatctggacccctttcctgtaaaagaactattcattttatcttttggtcgtcaccaagcaaacacaattataaataaggaaaataatatatgattgtaattttactcataatcccgaatgtctctcatgaccagcacacctttggtgtattgggtctaaatcaaagaaaaattcgaggagttgaatgaacgacgttttgatatcttaatgcattttggagaaaaccaactgttgcaaaaagctaaagaaaacaaaaattcattgtttatagatcaggtcacgtgtttttcatttctgcaatggcgatgtggttgattcccatggaacacaatgagagtgtggtctcctttgagattgtatttattgataaatgcaaaaatgctaatgaatgctaacttgctggttctccatggccttccttcctccctccctttccaagaaggatgttgtatctgtcagaggcatttgaaccagagtggctccatcttgagtgagggctaggaaaacgaggcttgaacttgctggtcggcattcccagaaagttaggtgttcctagcctctagatgtttacagttaagggaatagattgataacattcactaaacagacccagaattgggagtgtcctgatatcccgatatcttgagaacagaagcattcctaattttgctttaaagataataacgttgattcttgaaaaatatagtaatttaaaaaattaatcctttatcacaaacccttgtagcagagcacatctccccatgatctttttaaattctctatataaacaagcactgtacctaggggttggtgtgttccttctcttactttctggaatgccctactctgtctatggagtcgctgtactttcaccactttactcttttaataaacttgctttcactttgcactgtggacttgccctgaattttcttgcccaagacctaagaaccctctcttggggtctggatcgggacccctttcctgtaacatatccacctggtcaatttaggaggcagctgttatgtttatcaggatgaagaaaataaaactcttttacttcaaaatgtatttctatgatatagtttgagatggctgttcagaaagccagcaaacaggaggggccctgcaaagctgtcttgtatggggcgatttgcatctgcagataaattctgcacggatgcagccaggctttctcagaggccatcctccctcgtcctactgtaggaaagatggacagagagtctgacatctttaaaggtctgaaagaaacattcgccatctattctctctgaggcctgctacccgggaggtttcatctatatgacaagaccacctcggctagcttggcctcttcttctctttctcccatagcctgtgttgccacaatgcgagcctccattcttcaacctcaagatggtgtgaaatcttctgcactccatccggggcatggggttgggtaatcaccctatgagttaccctacgatgctccctgtgttcaggagagtatatttgtttgacttttctccaattaattttgcctttcatgagtttattttccagcaaaacttcagagcaaaaaggaaggttttaccttggcctctgcaatgataatgagttcagatgtaacatgaaaaatttaggaaagattgggagaattttttttaaagatccaggaatttatcttaggggaaaaaaaaggaatagtactggaaggaggatgcaggaagaatgagagagagagagagaaagggagattggggcaagtgaggaggaaggagggtttgtggacgtctgacatgctggagagataatgaggagaccagttgggggaatatgagcttaagaggttctagtgtgtgcctattcgagacactggagaaacaatggaattattttttagagcttctctggatatagaagatggtttccatttgaatgggatgccaccatgttgagccaggaaataaggctttccttaaaggggctgcttaccacagacattgattctctcgcagtcctggaggctggaaatctgagacaaggtgtgagcggggctggttcctcctgaggcctctctcctgggcttggagatgctgtcttctccctgtgttctcccatggtggttcctctctgtgtaggtctatgtcctcatctcctcttcttataaggacaccagtcctgttggattagggcccactctagtgacctcgttttaccttaatccaatcttgtccattctgcagccctagggccacatgcagcccaggacagctttgaatgttgcccaacacaaatacgtacttttttaaaacatgagatttatacacggacctgttttttcgctcatcagctattgttagtgtattttatgtttggcccacaacaattcttcttcttccattgtggcccagggaagccaaaagattggactcctttgccttaatcacttctttaaaggccctacctacaaatacagtcacattctgaggtcttgggggctaggacttccatggatggattgggtgagggggcctcgactcagctcataacagcagagttctaatggtggttctcagtctttgttttgaggaaagtggtcgcttaaataacgacatatggaaaagatacaatttaagtaatagagacttcccaggcaaaccccatgtaaggggaggaatcgaacgtatcaagggcattccccaagcccaaggtgatagaggtgagaaatgctcacttattagtgcctatttcagtctcctgatagattttcatttagtatgctgtaaacaaaaatatccctgcagacactggcacttgagggattacagtggtgaggagaaattcccttatttatttgtggaattcagtgaagcatttcacagtccaccttctggggataatctgttcattgccatggagtaaatcaatagccttcatttagattcttaactggcaatttgatctcattcactttacccaacactcattggctggagggatgttggagactgggagcaggctcctaaaaagggtcttgaaaatgttatttcaacaaagattaattttgaggcattgagagtttcagaaaggttgacttttttttctgaagctcttctaagccaatcttaaatgaatcctcagaggactatttctgtgggtgtgtgtctgcttgtgtgtgtgtgtgtgtgtgtgtgtgtgcatgtgtgtgtcttgccccattccaattctccatccccatgctgaggaggctggaggattcagaatgcagaatcaggtgtatttttaaaaaatcattatgtctgtcctcaccaaaacactggctatttctatctttccttctcattttactctgctataggaatctaagtaaatcatctttaggaaataccaagacctaccaggggttttagattgatggcggccgacacaacctagtattgatagcccatgtaaatgtttgccatccagatgacaaggataacgacaaaactaacatgacctgccccatggtgtgctagacccacatctcttggggaatgttttgaagcaagttaatgcaagctacttgataaaaggcttctgtgatgaaatgagaatggggaagctgagttaaacaaaatcaaacagtgttctgtgttggaagcttctcaaatccttaaccatgctgaaaagcttagagtatttccaggagaatggcatggcaccccgcatcccagacctgcacagcccctgctcaggccatcttgtgggatgaacagtatgcaaaacacacattctggaacatgcttgaagagaggggaggccactctctagcttgggcacagttctggctctggcacacactgacaacgtgacaccgggtgacagtccctctgtaaactgcgcttcctcatatgcgagaggccatggaacgttggcctctcagacgttactggctctaacattattttgccaaaaataaaataattagggtggatgtgttacaggaaagtggtccagatccagaccccaagagagggttcttggatttcaccaagaaagaattcaggtcgagtccataaaatgaaagcaagtttatgaagaaagtaaaggaataaaagaatggctactccatagacagagcagccgtgagggctgctgcttacccatttttatggttatttcttgatgatatgctaaacgaggggtgtattattcatacctcccctttttagtccatatagggtaacttcctgatgttgccatggcatttgtaaactgtcatggcgctggtgggaaggtagtagtgaggatgactagaggtcactcttgttgtcatcttggctttggtggagtttcactggcttctgtgcaacctgttttatcagcaaggtctttatgacctgtatattgtgccgacctcctgtctcatcctgtgacttagaacgccttaagtgtctgggaatgcaacccagtgggtctcagcctcattttacccagcctttattcaagatggagttgttcttgttcaaatgtctctgacagatgtaataggtaacgctcagacactgacatcagaggcaatgcaaccttaacagaattggctgacatatatctctgggtataaataaagtctcagctttcccctgagacgtaatgatgagtgtccctaaagtttgcttcacccttccacgctaaactcgctccactgttccatcatctgctttaaagccacaaggacagccagttaggcctttgtcatcatcacttttaacttttgtttaacttttaacaaagattggcctttttaaaggctcagttatattaaaaaaaacaactgcctgccacttacgcagtccatggattttaaacaaagctggcaatgcaagtcaatgggaaaagaatagtctttttcaacacatggaattggaaaaactggatacctatatggataaaaatgaactttgatcccttactccatactctgcacaagcattaaattaagattaactgagatttgatctgaatgtaaaatctaaaattgtgaagcttttacaataaaacaaagctagacaaagactccttctacaaatacctggcactaaacattaaaaaatcataaattgtgctcatcaaaaatacatctgctcttcaagatagatgaaaaggcaattcactgactttgagaccaagtgtttctgttcagaatatgtaaaggaattctaaaactcaacataaaaagacaaaaataaaacaaaaacacatgcaaaaaataaaaaaagatagaaaataagcaaattatttggacaaaaggctcccaaaaaaggaaatgcaaatagctagcaatcacaggaaaagatgctcaatattattagttatcaaggaaataaaaagtaaaaccatgagatactcatacccattagaatggctacagttaaaacgactgacagtactaagttttgctgaggatgtggagcaattggaatgctcatgtattgaggtgagaatataaaatggtgcaaacacttttaataactaccctatggctcaacaattccacttatagatatataccaaagagatatgaaagcatatattcatccacacaaagacctgtacacagatattcattgtagcgttattcatgataacttcaatcggagcagaacccaaatgcttaccaaaggatgaatggataaacatactgttacatattcatataatgacataatactaacagataataaaaggaataactattgttacctgcaatggaaacacatataaatgtcagaaatagtacgttgttaaataggccagatacgaaagagaatatgttgcatgattccatttatataaagttctagaagagacaacgtgaaagtcatggtaataagaacagcagttgcctgaagttttgtggtttggcgatatgaggaaattttctggagtgatggaaatattctatatttttattcggatgatgttttcacaggtgaatatatttgtgtaaactcatcagaatatataaaaagattctacaactcaaaataaaattttaaaaaaccacaaaaagttattgtgatggttaatattgagtgtcaacttgattggattgaaaggatataagtattgctcctgggtgtgtctacaagggtattgtcaaaggagattaatatttgagtcagtggactgggagaggcagccccttcctcaatttgggtgtgcaccatctaatcagctgccagcgtggtaggataaaagcaggcagaggaacgtgagaggactagatgggcttagtcttctggcctacatctttctcccagctggatgcttcctgccctcgaaaatcagactccaagttcttcaactttgggactcggacctttgaacacagactgaagcctgcactgtcggcttccctagttttgaggctttgggacttggactgacttcctggatcctcagcttgcagatgacttattgtgggacctcaccttgtgatcatgtgagtcaatgctccttaacaaactcccctttatatatacatctatgctactacttctgtccatctagagaaccttgagtaatagagttatgcatttttattaaatgtaaattatgccttaattaaaaataaatatcttctcaacctccaaaaagagactttctgtctgaaacttgagaataagtctaaagttttcatttaataatgaatttgtaaaagacaggaaaattgattttggcattaatttgttcaacaaatatctgttgagcatgtcctatgtggcaggggctgagtgtggggtgtggattgggtgaatgtaaggaacatatagttcctggctccctagagctcatggtctaggggttggagagaattggtacattgggattttaaagggggtgccaaaagtggtgatgacaaagctcagggaagaacaactggagtggagggagggcatcaacatggatgctgaaccaagccaatgtactgctaagagtgaggtggaaagtatcatgtgaaccccagagcttcaattgtcaataagtattggggtgtgaccagcagattgatagaagacagcaaagagagaggggtgaatgccaatagagcagaatagcatgacttgtcaagagacaggacttttcaaggtgaaaggaagggagatggtcctgaagcagcagtcatgtctatgacccacctaagccctaagcaatgacagataggaacagagtcagggtcctcagaggacaacctagttttaattaaggacagaagttgagaagaatattttaagaaacatttgaggacatattacagtttgctggctatgggttagggtagggtggaagagagatatttggaataaagggtatggatgggacaagacaaagcagggcaccagccctaccttggacctttccttaacttgagacagccatgtccatgttgattcagccaatctgactcaggtattatgtaacttgaagttgaaccatcccaactgatataagtggtgatactgagtaacacaaatgtgctttctggattcacacatgtactttttttacatgaaaagttcaaacttctatgtggagaattttttcttttttttgtttctttttttgtttttttttttttgttgttgttttgtttttttttttgagatggaatctcgctctgtcgcccaggctggagtgcagtggtgcaatcttggctcactgcaagctctgcctcccggattcacgccattctcctgactcagcttcccgagtagctgggactataggcgcctgccaccacgcctggctaattttttgtatttttagtagagacagggtttcaccattttagccaggatggtctcgatctgctgacctcgtgatccgcccgcctcggcctcccaaagtgctgggattacacgtgtgagccactgcacccggccgatttttttcaacagtatcctcaagaagtattcatcattcaactctttctaggaaaggtatttaaaaaagaagaaaaatatcatttctggcctggaatgtcaagacatacatctcttagagatttagttctaataattattgtagagtcttgtggatgtttcttataattttaatttttacaaaaacaaatctgtccatccatgcatctacgtatgtatgtatatatgtatgtatctatctatcttcatcatcataattatgcatctaggatctatctattgtgtatctatctaataatctatctatgcagaactgcaacatttacatgactggcccataccgccctctgctccccactttttctaatcttcaaaatcaagtttctggactcagggctatgaaatgcaaagtgaaacagctcatgtccaatggtctgacactctgctgctcatgaaaacctgcaacatccaactgagtttttcatttttaacatcagcagatctagttctctatcttcatagagagttatttttaattttattaggggataaattcttttttaataaagaaattattaggtatcaaaataccacaatctctttttggatacaactagattatgtgtatgggtgaagtattttcaacttaagaataacattcctgttccttgaacactattttggaagtttgggttaagggatattaacttccttaagacaaaacagactcacagttgaaaactactcaccttctctatagaagttgcttaatatcaataatttttattgtattggaacaaaatagactataactttttataagatacatataggtttactactaaatattcttaaaatgaatataatgctataatattcttattttgaggtaatatatatatagtctgcaaaaattaggtttcctggtgtcattaaccacttatgcaattatttttctgaaatgaatacacatgctgtacgtgcagttttgcctgatacaagttttaaaacaacgtatattggaatcttggaactaaaaatgagaaaatcagtgtccccttgatgtcaatttcagttcaaactgcacttgctattttatttttaattggttacttacattatctgtacattgtcacagttgatggtatttgtttacttctctgtgaccataatttgcacagatttaaccataatacatccttaaagattacaagaaatcttttagacacagctcctctcagttgctgaggatccaacttttactcatttgttttcttcatgaatatgtatttcctgagttgtatgtttgtacatagctatttgtagcctttgaagtttatggaagtttgtttggttgcattcttggggcacattttctttccctgatgactgttaaggttaggatatttgacccttccaaagctcatgttgaaatttagtccccaatattggaggctgggcctaatacaaggtgtttgggtcatggggacagatcccccccattgaatagattaatgtcctctcctgatggtgaatgaattcttcctctattagttcctgcaagacctggttgttaaaagagcgggccacctccccggtttctctcttgcttcctcgctcatgtaatctctgcacatgctggcttccccttctcttctgccatgagtgggagcagactgtggccatcaccagacgaagatgcccaattttgaactttccagccaccagaatcataagccaaatcatccctttgcctttataaattatccagcctcgggtattctttatagcaacacaaaagggacaggactttttatatcttgccccactgtcttctagcatttcatgtgtcccataaagaaatcttagtctcctaggtttttttttttttctgaatatccacagaattctttccataacttcaaataccaggaatttattggggtatttgttaattattcaatataaacacagccttgtaattcttgggctatttctgtctgcagattcaaatttcactgtatttcaggaatttcaccttgaattgtatctttgaaaatttgttttcatgttccattcattttttaacccatgcaaggcatttagtgttaatgatatttgatctcttccctaccactccctcccatccccctctttttctctatctctgtcttccatcttttacttttcgttcttttccatctcacatgctcattttttcttctcaaaaccatccttcgaattccttcagtggtgtctcatctcccttttgctgcttctatcatgacctttgattttggtctctttttgtgtgtctctctctctctgagattctgaggctctgcctattccgtttttattctcatttgtttctaattgtttctaagactctgtatactcctttttcattctcatttattactaatttatttctgaggctttatccactcacttttcattcccatataacctaatgtattatcagttcttccttaaagccttatattgcttctttaaattctcatttcagagaaacaatattgtctttaattgattccttagaaataaccttgttcatggtttttggctgcgttgtggtatataatctttccgtttctcatcttcataaatcatgttctgttcttcttttttcatttcagcatcattataaggcccccggctggctccaccctttttaagtagcattgttcctcatctttttggactagaattttgggcaaagttctggggaaaggggaagaagaatgtgccaaacaagtgggaagattgggtttcagtctgttatctctaggatgtttctcagctggacttggcctgtgggttatctgttctagcatagcaggatatcttccaggctcacaaggaggctgtgcattttacagaacattttaatgtgattattttaccttgacttatcttcaccaggcagctttgggcaaagacggccaggtagcttttatcttattgactcttccttctatcctatgccatgattgaaacatgatgtaggcttccaaaaccaggccatgaaccttgatcttaactttctaagcatgggatagacacatttcctttcaatgtgtgccacccatccactttggataactatgagctgggtccactctgcctgagtcagacatagaaagataccttctcttggagttcccaaatacctccatccacttctcatacacttggctttcttcctgcatctactgtaatccagtgttataggggatctgtagcttcatccaagataacatttgtttgtttcttcttctcttgtttgctttggattggtttcataaaggaaatcagacaaaaatatatttatactaccatttgaaaagaaaagataaattccttctttcaaattcattcctttttgtttctttccagtgaatctcatggggtgaggggagcactgaagggaatgtccaatctactcaaatccaaaaagtcacaggtataaggcacagaaaattttaccagtctaatgatggcagttttaatgctatataaggacagagtatgcaaaaatgctattaatgaggatgaggagctgggagttcgcaaaatgttggcccagatgagtgcagcagacatttggcccaggtgagcctagcagatatttacatgaaatattagggagcatccatctgggctatgtgacttaggctggcgatacacgacagaggattccaatttgttgtataaatcaccctcagagcccccagcagtgaacacatagggggttcttttcattttcatgatgcttaatatagtctttaaaaataattaaaattaggtgaagtgtgtagatttctgagaaattacagaaagacattagttttgatacctcttgcttgtagcatttgaccaacataaacaaactaaaaggtttaaaaagaacagggattcttcccagtggtatagtgtaatgggtagggaaaaaaagttcaaaattgataaatagaccaatattattctcaaaactcataccactgtcattgggaagaaatgaatacatattacttagtcacttcatgttaccatatacttatattaacacaacaaaaaggaaattatacgaaaaaaagtcatacatttaaaggatggaagaaaatcctaggtttactcggagctcaagatcccattgagatgaatattgttctttcctcagattgttccttcatttcattcattcacttatgtatgcatttatttatttagagatggggtctatttctgtatttatttatttatttattgatggagtattgctctgatgcccaggctggagtatagtggcacaatcatagctcactgcagccttgaactcctgggctcaagtgatgctcctgcgtcagtctcctgagtagctgggactgtaggtgtttgccaccacgccccgctaatttttaagttttttttgtattgattgggtttccctatgtttcccatgctggcctttaacttttcagctcagcgatcttctgccctggcctcccaaagtgctgggattacaggtgtgtcccttcatttctaatgaaggaaggttttcctttgaatattcacaacagatatttttaaaagaaaggcagatttgaagcaaccatcaacaagctttacctgaaaattaatctgatatttacaattgcattatataaaagaaatgttacagactgaattgtgccacacctaccccaaaactcttatgttgaaatcctaacacccagtacctggaatgtgattgtatttggagatgggtcattaaggagtaaattaaagtaaaatgaggtcacatgggtgggccctaatccaataggactggtgtccttataagaagaggagatgaggacacagacacacacagatagatgaccctgtgaggatacagggagaagacaccatctacaagcccaggagagaggcctcaggaggcaccatccctgctgacaccttgatctcagacctctagcttctagaactgtaagaacaattgttgctgtttaagcattcccatatgtgggactttgttatggctgcctgagcagcctaatgggagtgcaaagactttctttaaataatgtataacaatgctggtttggaaatgactatccagtgttgagttcaaaactttatctttatggatgctgctatgagtgagtgtctaatttgggggcataatattgacattcttcgggagaaatgcagactccaatcagtgcagaaaatggcacagaataatgtttaaatatgccctccaggccataacatggttgggttaggaggaggaatattaaccattcccatcctaaaacacagaattttgggtttctttctgtgagttcaccacctctgaccttcacagttaagggaccatcacacagacatctgccattttcatataactgtctatccaaacaaaggctgaaaattcagcatggaggaactctcccagcacccgtggtcagccccttggcctgcatccccaccctgggcactggtgtgggggtgggattctttatgaacttgggccccaattctgcttcccctggaaagctggacccacacaacatcaccctcatatgcagaccctcatgtctgggcacctgtgcctacccggagctgggggtctgctctaggagctggttcaggacaggatactcccatccaatctgtgcccaccatagaaaagagccagccaagtgcctgctactacagggctcttcacacatggaaaagctgccctggggaagtgtcccaggaaagggcagggggacaaaaaaaggtcacagtgatttgcctccagacactggacactcttccctggagagtacagggcatgctcctctccaaacctgatcttgctacatttgtgctgcccacagtagtggtgccactgagttttcaaagaagacagcaggccctgaattgtgcaaggaaaataagtgcttgaattttgtagcatgcatgcagtgttctacttttaagaatggtaccaggctcctctgatattcaagaaaggcccccaacagctcagatggtagttttctaatcctgtcttcccacatgcacatttacctcctccacccaagaactgaataacagacatgagtgctcaggacgtcatgctgtctactgtcatccccttcctaagaccccctctccccatctcttgacacccctgttcttagctccctctttctttctggcctgttacactcaacctctccagcatcctaacaagtacccactcaaacctatttcctcccctgctgtgctgcttcttcaaaagtgctttgcttctcatcctcaccttctttccttgccctcttccctgcttccctcttcaaagcacttctcagctacaaatgagaaggaagggatctgattaaacaggctatgagcagagtcatgttctgaggagatttgcatttttaagaggagattaatgaccacatctgacaatgtgaccctggaatcttatgcagagtgataggggatttgggatgagctccgttcagggtaggaagcgagagtttggatctgaaatacttttcagatgctgaagtcataggagcttgcagttgcttcctgggcagagccataaacaaacatctcttctgcagagtgggggctgagaagatggaacagtgacccaggagctatggaattatctggccatgttacacttgcaggactacacacatttaagtgaaaaaacatgcttttcgtccgcctggctgacctcttagcctgctctcctcttattgttcccttgaaggcatcattttttgaaagagaaatttaaaccctgtccatctcatcttctttggaagaaagttaagattcctttctgaggtctttcatcatctggagtttaaaagcttcctctcctctatcaactctctttgaatccctcatgtcacaccaaacttcaaaagagacaaatacttttgcatgattccctgcaggctctgttttgccctgtagtgacagccccatgtcttcgctttcctgactggaaaaacttctcaagctttctacattcatgatctccacttcttcagtgcaaccttctccagtttgtctctgatctccaatggtccctgcattaatcttgtccgagccacaggtgaccctcgtatcatctcagcttctacttcccagtctctctctgttttttttttttttttttttgagacaggggtctcactctgttacctaggtttgtctcaaactgttgggctcaaaagatcctccgacctcatcttcctgagtagctggggtaggggtgtgagcccttctgcttggtctccagtctttgcttttcttttttgacctatacgtttggtggttgatgtccatgttcatgtaattgtcttctctggcttctcagggccaccatgcattcccttctccctcttttcatttattatcttttcatctagtaaaacccatcttcccctaaagatgtatattttcctcaaagcaaggattggcgtaccttcacaaactgagtctccaatgacaacacaaactgaaatgcaatataaatcatggacagatgtgagctcctcttctacttcctgtgtcctctgctggttcttctcaccaacatcacgtattgctaagtaagccagtgatgtcaagttagaaaatggactgagtccattaattcatttggcacgctccaaagtcctcacctgagatctatctactctccaaataattacacttcttagaaatacaggaagatccttttcacatgagctaattagggcgaatacatgtaagtgttggtaagaagtactagaaatactggaatttgtgagatttcattgaagaaccaacttccacccagcccttcacattgttctctttcggtagtttcttgtcatttcctccttttactatcaatagggctgctgtgaacatgcatgtacaagtttctgggtggacatatgttttcattttttgggggggagtagatatcaaagagtagaattgctgggttgtatgatgaatgtgtgttctaacttttcagaaactgggcttctactgcttcctaatttcaccttccacgccatttctgtagtgaggcccactccttggccttacaagacctgaattaagttaggtgccagagtcgttctgtcattgactctgttctttcccttgctagcctgtgtaataattggcagtcagacctttacataagcaagggtttcatatgtctccccagttatattacaagttccacaggggcagggctatgtctatctccttgacctctgaatctgcgatgcctggcagagggctgtggacaccggtcaccctccataaacactgggagacaaacaagggagtcagtagagttatttttttgcttttctacccccagaactgttagaatatgatttgagctattccttcaaggaagtcctggggcaggtgatcattcatagatgatgtgagggagtgcacagcacatgagtttgcaggaaaatgcaaaccccacgttgaaatttgatccccagtgttggagatggggatttacaagggggtgtttgggtcatgggggtggctccctcatgaatggcttggtgctgccctcatggtaatgagtgggttctctactcaatcctgcaagagctgattgttagaaagagcctggcaccttcctctcctctttctctttctcctgcttcttctctcaccatgtcatctgtgcacacaacagctccccttctcattccaccatgagtgcaagctccctgaggcctcaccagaagcagatgctggtgcaatgcttcttgtacagcctgcagagctgtgagccaaataaacctcctttctttataaattatccagcctcactcaggtattcctttatagcaatgcaaaactgactaagacagggtatcaggagacctagatttgcctgcatctgagaacgtcatcaggactcttggaacaatttagcccacagttccaaggttgatttttgtcacagcgaagttcaggtagtaagaattctcactggtggctgttgagggtggtggtggtggggatgggtcatatggagaattagcagtgggagactagaaattaaagtggagaaagggaagaattaaaagtcaaaaacagtgtgagggaggaaagcaatggatataacacctcggatctttatccttgagaggccttaaaaatctacttaataatcagatggtattctataagaactttgagactagacatgtgatgacttttaggaaactgccctggagctgaaaatgcatgcaaatctagctgactcagctccagccttaactggctcataacttgtttcataaacatgactgtatgttagcaaggaaatgagagagaataacagcacatcacataggcatgaaaagtatttgcaaagcagcagttctcaaaaatgacattttgcagagttttccagaagcagattcagaaaactgaagaccaaagtaatgagggagctgtctcatgcctagatgagcagaagcataccaaaggcttagtatttccccaagtaataggcacctgaaacttatttaaggaaaatactcttcttgatgaaacaggcactgcagttgaagcaggaatgtgtttggtgtgctgccttaaatagcatgggtagatgttcaaacatgttaggactcactggccctaggaaagacccgcaagtatctggtctacaccaggaaattgacaatgaaacaccaaacaccttttctcctctaattaccaagaaaagtatttctttcccaatggtggaagacaataatgttgggaatgatgaagttttctggagtgtgaagtggatatgtcttataagtttaatccacagcttcaccacttcataagtggataatcgaattgtgcctcagtttcctcagacttggggatattaagagtaccctcagtcaccacaaggtgggtaccaacataagaaaagggtatagcaaaagcccaggggtgcatgttcttaaagtgcctagtgtgggattagaatgacaagtggtagatgacttacttgtgcagaaatttagagttattttgtgattttcaaatgatcatgggtgctttccatatgctgtccagactgggggtgctgcagctagaaagggaagaaggtttccgtatttcctgagactggagtcacatcctctcaccaatgcactcacctgctgactaaccagtgtacttctgggaattgcaaatgcatgaaatggcacccattctagactagtcacagcagtgtttttgatggccacagaccaggaacgaccctgatgtttatccgtagggaactaggtaatgagccatgatcctcatcatggatactgtgcagctgtggcaaagaatgaggtatccttctgtctgtgcaccgggaaaggtttccaagatacactgcacagtgagaaaaacaagaagcagaacaatgcacggtgtgctacctcttgcattacaaaggaggaaatgtaaaactaatttacaaatggccaataagcacatgaaacgatgctcaacatcactaatcattaggaaaataaaaatcacaactacagtgggataccaccttacatccattatgatggttgttctcaaaaaaaaaaaaaaaaagaaaaacagaaaagaaaaatgttgacaaggaggagttggaacgcttgtgtagtgtttgtgggtatgtaatatggcgcacccactgtcatcgtttctcaaaaaattaatcatagacttaccacaaaatgcagcaattcagcttttggtgtattccaaaaagaatggaaagcagggaccccagcagatatttgcctgtgtttgttcatagcagcattatttataatagctaaaagttggaaacaagcccagtgtccatccatcgtgaatgaataaacaaaatgtggtctatacgtgcaaatgaatgggattcagctgtaacaagaagggtggttctgacgcgtgcttcaacatgatcaagccttgagttctttctgctaagtgaaataatcagactcagaaagacaaatattacatgattccacttgacagaggtgcctaacgtcatgaaatgcatagacggaaaatgaacaggtggttgtcagtggctggagggagggggaaagaggagttggcgtttaatgggtatagaattccagttcgggaatatgaaaaagttctgggtggggatggacagtggtggtggttgaacaacaacctaaatgtacttcctgccattggatgtacacttaaaagtggttaaaatgggccgggcgaggtggcttacatctaatcccagcactttgggaggtcgaggtgggcagatcacaaggtcaggagatcgagaccatcctggataacaagatgaaatccactctctactaaaaatacaaaaaattagctgggtgtggtcgcatgcacctgtagtcccagctactcaggaggctgaagcaagagaagcggttgaacccgggaggtgaaggttgcagtgagctgagatcacggcattgcattccagcctgggtgacagaatgagaccccttctcaaaaaaaaataataataaaaaaaagaaaaaagaaaagaaaaattggttaaaatggtgaattatatgttatatatattttatcagaatttacaataattcctattgttttgcataaaacagctgtagaaagctttgcaggtcatgaacagcacagctggccactggggctggtgtggggctaggacctggttgcacagggaacagggatgagacacaggctcttcatgcctgcacatatatacggatacacacagatgcaaatttctaagccatctaaatacaacacctattcaaaaaatcaaacagaaaaaggaaatgttatggaggtgaaggatgagggtaggtggggtggctgctcaggacagtggaggccacatcacgcaaccttcgaggcctctcttagctgctggagcacatcccagggacttgggagctctggaaagaggagcaggagagggccatggccggaggaggcctgaaaaagatcatctctgccacagagaagaagctggctcagatgcttgtggccactgtggagacagggagacccagggagacaacagtattcactcaaggaggaatgggtggtgatgcaaacttgggtggaggccacagggtgcagaagacaggacacagcagagagtgatgtaggacatggaagggacagaaaggagtgaccaccggacataaaggggcaaggaaagtggaagcatgagaacatctgctgggcatctggtggagggatcaggttcccagggtgcccatccctaagggagaacccaggataggagcagattcagagaaaaccacccagctcactccagcaagaagcagaaaagggactggttaaaggacagggtaggaaggtcaccaagctccaagggccctcatgaatccagcttgtaggccacagggcccagggcaaggaccaaaccacaggcacaggacagctccggccaagatcttctggctactgcaggaggcagaaaccacaccctacaccctgcactgctgaggctagccctggagtccagaagcttctgcaccagaacctttggtcccccatccccctcaaaaaattaaaaacaaaaagcaaatcggtgccatgcacactctgtttcctggtgctgttctggatcctgagtctttcatgggagcacctgatggggaaagcctggacctgtgttggtgtccctcctgcaaggagtgctgggacaatgaaatttctggcttcctccttgggaaggcagaacattccccatgtgtactggtggcatttaaaaactgcagggcagccagagaacatgcaccgtgttccaccaggagagtttctggcgggttgtcccggtgcagacacccgtcccaaggtgggtatttgagctgaggaactgagaagccggtttctgcctagagttagagatccgaaaggcatcaccacatggaagggaggaaagctacgatgccttgagggtgggagatcagatgaaccaggagaggcagggcccgggaggaaccccggggagcagccgcctttaaagcctgggggaagtagcttcagagaaggtggggtaggtttgtgtggggggtgctggaaaaatataattaagaaagaaatttctgctcagtccagaaacccctgtcacatccgtagaagtaaaagaaacctgtgttatgattgagtaaccattaagccaaaatgtgatgcaatctgctaagagatgacaaagacagaaagaaatcccacctttgtatccagccaagcaggtgcaacccgttacacatatggtctccagatagatggtgactagttcccagttgagaggactcaatggccccatttgtcacacatagttcatcctaaattcacccagtaactgtgttggttctctgtgaggttaattggctttatccacaggaaaaacaaacctctcttatctatgacaggaggtagttttgcaactgggaatgagatgcccccagaactgaggttccttccttctcacagaaactgggagacaggggcgctttctggccagatgcctgcctttcaaagagatggctcctatggccttgaggaggatagttctgggttgtgaggcaggcaagatgcttatgtatgtttagaaagctttacatacatcttcaagggacagagaaagaattttcaattacacctcttctaaaaaaaaaaatgctctcaaagtccagcctaggcaacatagcaagatcttatctccacacacacaataataataataaatttgctgggcatagtggggtgtgcatgtagtcccagctactcaggaggctaaggagggaggatcacctgagcccaggaagttaaggctgcagtaagcttggatggcaccactgcactccagcctgggtgacagggatggcaccactgccctccagcctgggtgacagagggaggctctgtcaataaatgaatgaatgaatagaaaatgctctgagtgaaaagaggagagtctctttatctttttgcaacaggctaaacaaaatttttagaatgtatatttgcctcacagagattattccaggaaaagaagtggccctcagtgtcaaaggatgcaaaactaacctgtgagttcctggcaggtttagcaataaagcaggatgtttctgatctcagtacaagcaatgttagagaaaggggaggatggaagtggacgtggaccagtgagtggaaggtgacaaatggaagcaaaggaacgtatccagaccattgaagatgcttgaccgagaggaaaggggcggtggagggaacggaagcccgaggaagtcatttgttgcaataagaggcctcagagcacgtgtagggtgcggggcagagcccatgcagaggggctgtggaaggctggcagggtgcaggtggccccactctctgtcaccctgaggagtatgtggtcagagttaaagctcagtctgtttctgggatcaggtaagaggtcagcgtccggagaagggaggtggatcttcagatcctgcagacctccaccgcgccctctgtccctcttgactgctttttctccatctctattgtctggctcacattcctgtcacgtcttcctttctccctacccctcttttctcttttctcctctctttttcttaacccttgtacctttggaagtcccactaatagaatttaaacagcttttcaagttggttttttgttcccagaaattgacattagactctccatgaataatgtagaaatcaagagtataagctggttcatgtctctgcaaataaacaaataaaatctacattccaatgctttcttcttccagagtagcccacatttgatatttgtttttaattactgtcacttgcgatagatttttaaatcttgtaacctggttacacaaataccatggggcaaaagccttacttcctgtgagaggaaaccaggcttgactagcctcatgctggctttgaagaagtaaaatcaggggttgatgaatttgcatagggtaaatatcaaaggtcgaaagtcaacaataggtgatagagggaataccccaaattacaaaagaacaaactgtttaagccacaacagaattatcgtagaaataaaccacggtccttcctgctaaaatattccacttagaattgtaaaatattcttctcaataactcctggaagagcctattaagaaattagtgaggctgggtgcggtggctcacacctctaattccagcactttgggaggcctagacgggcagatcacctgaggttaggagtttcagagcagcctggccaatatggtgaaacactgtctctactaaaaatacaaaaattacccaggcatggtggcaggcgcctgtaatcccagctattcggtaggctgagggaggagaatcgcttgaacccaggaggtggagattgcagtgagccaagatggcgccactgcactccattctggacgacagagtgaaactccgtctcaaccaaaaaaaaaaaaaaaaaaaaaataagaaatcaacgaatgtaagagcatctatgttccaaatgcagtgtattattttatgcaggttttcacaagctccaaaagattcactgtgcagaactggaggttctagagaaagaccacgcctcctcctgcaggtaactcttcattcaggaagcagctcttggcttatccctgggcttagtggaattcgaatacctgaccataggacaccaagggctttgggacctgagtggcacatcatgtcctggtgacatctgagttacctggggcgtgcacagcagcctccagcatcccagggagagctgtgtacggggtcaggctcaagcgggtcccagggcaccagtgacccaatgggtgactcagactcccatggcacctgctccttctgtttctccctccgccgtatatatgagctcatgggaagtgctgtgacctcttacagaggaggaaagtgcatggacttccagcttctagaactgggatacaataaactcctcttgcttgtctattcctctgcagtattttgtcatggcagccctagcaaactactacagggactgtgggggttaggatgacaccaagcatcaaatgccactccctgttccaacactgagaccattccacagcccctgaatgacaagacaggccttcaagctcaagactacttggctaggtaagtactttagtcacaccacttctgaactttcttgcctacctgcagggcaggaatttttaccattttcaaatgaggacactgaagctcagagaagtgatgctatttcctgatggataagaggtgatatatttcagtcctcagaccaactctgaagtagcaagcttctagtcttaagagtcaaacttggctgggcatggtggctgaagcccataatcccagcactttgggaggccgaggtgggtggatcacctgaggtcaggagttagagaccagcctggccaacatagtgaaaccccgtctctactaaaaatacaaaaattagccgggcgtggtggtgtgtgcctgtaatcccagctactcaggaggctgaggcaggagaatggcttgaacccgggaggtagaagttgcagtgagccaagattgtgccatttcactccagcctggggaacaagagtgagacatcatctcaaaaacaaaacaaaacaaaaaagagtcaacctcgagccaggcacggtggctcatgcctgtaatctcagcactttgggaagccgatgaagtcaggagttcgagaccagcctgggcaacatgctaataccctgtctctaccaaaaatttaaaaattagctgtgtatggtggctcatgcctgtaatcccagctatttgggaggcggaggcacaaggatggtgtgaactcaagaggtggagcttgcagttagccaagattgcaccattgcactccagtctggagtgccaaaaaaaaaaatccatctcaaaaaaaaaaacacaaaaagaataaatatggggcctcatgactgtatattactgggcttctgacctagactgaaagatcagggaagagtttcctgaagagaaagtgagctatgatgggcccactgtactccagcctgggcaacataatgaggctctgcctcaagaaaaacatgcagaataaaaccacaaaaagataccactacagaactattagaatggctaagattaaaaagaatgaccacgccaagttttggcaaggatgtggaggcactggaatgctcacgctgctggtgggaatgtaagatggtacaatatctatggaaagcagtctggcagcttctaaaaatttcagcatacacccaccatgccactcggcaattccattccattcccacattatttttatttaaaggaaaatcaagtggaatgatctttaaagcatttttgcctgacaaatacatgaaatgtgggtagcagcccaacactccctggtcagtcttcacagggcatatgtggcctcgtggcccccaggaaatatggctctttccacaagtgctaagtccagtctctccatcaatcctaagatgttagttccacagcactgccagcatggggctttgtctatttctttctttctttgtcttttttgagaggggtcttgctctgtcatccaggctgaagtgcagtgatgcaatgttcgttgtaatagctcccatttcatttctaattgatcttatttggctcttctctcttcttttcttggttaatcttgccaatggtttatcaactttatttattattcccaaaaatcagctttacattttatttatattttgtattattttgtttcaatttcatttagttctactctgatgttggttattttctttcttctgctgggtttgggtttggtgcattcttgtttcttgagtttctagaaatgtaaccttagattgtctatttgtgctctttcagtctttttgatgtaggcatttaatgctataaacttttagcacactctttgctgtattccagatgttttgatagggtgcgtcactattgttcagttcgaagaatttttaaacttccatcttgatttcatatttgacccaatgatcattcaggagcaagttatttaatttccatgtgtttgcatggttttgaaagttccttttggagttgatttccagttttattctaccgttgtctgagagagtacttcatataatttcaattttcttaaatttattgagacttgttttgtggcctatcatatggcctatcttgaagaaagttccatgtgctgatgaatagaatgtatattttgtggttgttgggtagaatagtctgtaaatatctcaagtctattttctctaggacatagtttaaacccattgtttcttccttgactttctgtcttgatgaccagtctagtgctgtcagtggagtactgaagtccctcacaattattgtgttactgtctatctcatttcttaggtctagtagtaatagctatataaatttgggagctccagtgttaggtgcatatatatttaggattgtgatattttcctgttggataaatccttttattataatattttattattatataatgtccctctttgtcttttttaactgctgttgctttaaagttagtttttttgatataagaatagttactcctgctcacttttgtggccatttgcatggggtgtctttttcttaccctttaaccctttaaagtgtttatgtgacactttagggttaggggagtctcttgagggcagcagatacttgcttggtgaattattatcaattctgcaattctatatcttttaagtggagcatttagaccacttacattcaatgttagtattgagatgtgaggtactgttccattcatcctgctatttgttgcctaaataccttggttttattcatttatttattgtatttttgttttataggtcctgtgagattcatgctcaaagaggttctgttttgatgtgtttccaggatttgtttcaagatttgggttccttttagcagttattgtagtgctggcttggtagtggcaaattctctgagcatttgtttgtctgaaaaagactgttatctttcctttatttatgaactttagttttgctggatacaaaattcttggctgataatttttttttttttctgagatggagtcttgctttgtcacccaggctggagtgcagtggtgcgatctcggctcactgcaacctccacctcctggattcacaccattctcctacctcagcctcaccagtagctgggactacatgcgcctgctaccaggcccggctaatttttttttgtatttttagtagagacggggtttcaccttgttagccagcatggtctcgatctcctgaccttgtgatccacccgccttggcctcctaaagtgctgggactacaggcgtgagccactgcacccggcctgataatttttttttaaggaggctgcagatgggtatgcatgctcattggaggtgagcattcttcccttattgaagattactaaaatcacatgtattgaaaagcatttgggattatttacttaattgatgagtactcatttatttttacatttatttgataccacgtataaaaaagtatggacatatacatatgtgatatgcgatacaccatagaacatatacatgtgcacataaagatagagggagacagaaatacttcagattttttcttttaaaactttttgcatgaacccataaaactcactgttaaaaaaaacagctggatttaaattgtgcttttgcaaaaagcaaaagttaacatttaattgaggaagcccttgctgagttttagagaaagtaggtagtaaatttacatctcaaagcacacacacacacacacacacacacacacacacagagagagatagagagagagagagaaggaatttgggtgtgttcaaggaagattaaaagtagttgccaaggtaacacaaaaatgatagaaatttataacaggattttataaggagaccaattttatttacatatatagcttttattttggtctctgttttccaactgtactccaggaaacacactacacaggctcccttcttaagtgctggtgggccactgcacatgcagacagcccactttaagggaagaatcaggggagaagagatgcagaccccagaattatgccaacatacaaaagcctaagtcaaaggtcaaaccacacacttgaaatctcatcgcctgtttggccctgttttaagtgtactttactttctttaatttctgctctaaagcttttaaataaactttcactcttgctctaaaatttgcctgtctcttcttctgctttatgacacttagttgaattctttcttctgaagaagcaagaattgaggctgcagcaggcttgtacagatttgctgccattaatatagtttagtgccattctacatgatagaatatatatattcttatatttatatatatatatatatataaaatttatgtattcatagaggccttgaatctacattcttgctgcactttatgtaaacaatccaggtataagactaaaacttattttggaaatacattggtcccatatgatttctatttcataaaaatgggagacaggagggggaaaattatttttcagaagaaaacaacagaacaatggttattgaattttagatctgttcatttttttttaaattttgttatttacctacaatttggactgaatcctaaattttttcctggctcaaatttcaaaactaatggtttcagaattttcttccatttttcttccattttggtatattataaattaaaactgtgatttttaaatttttatcttttttattacacttttaagttctgggatacatgtgcagaatgtgcaggtttgttacataggtgtacatgtgccatggtgttttgctgaacccattaacccatcatctaccttaggtatttctcctaatgctatctcttccctagtcccccacccctcaacaggccccagtgtgtgatgttcccctccctgtgtccatgtgttctcattgttcaactcccacttatgagtgagaacatgcagtgtttggttttctgttcctgtgttagtttgctgagaatggtgtttccagcttcatccatgtccctgcaaaggatatgaactcatccttttttatggctgcattgaattccatggtgtatatgtaccacattttctttatccagtctatcattaataggcatttgtgttggttccaagtctttgctattgtgaatagtgctgcaataaacatatgtgtgcatgtgtctttatggtagaatgttctataatcctttgggtatatacccagtaatgggattactgggtcaaatgatatttcttgttctggatccttgaggaatcgccacactgtctttcacaatggttaaactaatttacattcccaccaacagtgtaaaagcgttcctatttctccacatcctctctggcatctgttgtttcctgaccttttaatggtcaccattctaactggcatgagatggtatctcattgtggttttgatttgcatttctctaatgaccagtgatgatgagctttttttcgtatgtttgttggtcacataaatttcttattttgagaagtgtctgttcatgtgctttgcccactttttgatgggcttgtttgttttttttttcttgtaaatttgtttaagtttcttgtagattctggatattagccttttgtcagatggatagattaaaccttgcaagctgaaacttgacgacttatgtaaacttctggagaaatcatagcaacttatatataaacaacctttgtgcctgctgatgtgtggactacacaaaaggtacacatgaacactgtattcagactgcaattcagaaaaatgtgtcagattgccattgcaattggaagacacttcagaaactctagaaaacctagtctatacagttagagcgatgtttgccaaatgaattcctctaattgaagcagcagttgtgtgactttaataaggttccaggattatactgtcccttttttgctgtgacttccctttgcccttttctgaattgtcttcatccccttttccacggggcatgacttcttaagaatgagccttcctagtgatgtaggatcagatggaacatacagtcacaaagtcatgtcttctacaatgatttctctgaaagcttttgaggaattgaggggccaggtgtgctggcagaggcctgtaatcccagcactttgagagtccaaggcaggaggatcacttgaaaccaggagtttaagaccagcctgagcaacaaagggagaccatgtctctacaaaacataaaataaatcaaattagccaggtgcagcggtgcctgcctctagtctcagatacttgggaggctaaggctggaggaccgcttcagcccaggagttcaagactgtagtgagtacactccagtctgggtgacagagcaaggttttttctctaaaagaaaaaaaaaaaaggaaaggaaaagaatagggtaaacaggaaagccaaagatcttgggcatctccagatgtttgcctgaacaaattgttttttcttggcttcaaaacctttcaagatgcatatttctttgtaaaagaaggacatacgaatcgtaactttaagtgagcaatcaaaatctaggtcctaaaactgaagtattttaactctcattctgataatatttattttctgaggcaaagaagaaagacaagattagatcaattgtttctctgcccactccatctcttccaacttgccttgtcccctttaatcaaatgtataaatactaagcctcctgaaacgtcttcagagaaaacacaagccacagaggttttttgcaactcatgtattcccagggtgcactgtcaagctctggctcaataaaactcaattggtcaagacccttgcctcagtcagtcattctggataaccaccatgagtcctgcaaagcccttcagtaatctattgcctgcctaggtgatgtgtacctaggtgagtcagatcttcatgagtccaacactcgtcttccttttctgtctttcccaaccctaccactcagtgctgtgtgctctgatctgaccccagctcccaggttgtttgtattggtctaagaaagcaagaccaggaggggcaggttgagaaggaagtaagaggccaactgccatggaaagtggcaggtggggctgtcattgctcaaagccacacactctgggtgcattttatgaatttttctggattcataatcttctccctctgtgtctatctagaaactcaccctcctcctactttcttctcattactctttctgtttctagtgcactcatttatggccagagaatggccatgcaaatagttgacaatagaataaaaaatgacattttgtgagacttggaagctggcctttcttttttctaaaagagattgaggtttctaaaagctagcttttatggagggctgtgcagttatgattgtagttttacagaacaggtgcataagtgaagggtgagacagaaaacaaaatgctggctgtttgtcaaatcctgaaagtgaatgggacaaaaatcatgtttgaaggaggatgtcattcaggagaccttgtacatcttagagtgtcctcttaccagatgaagtggaggatgaggttgaattgtggggttaggtgacagtgggtacatacttctctgcctcagtttttgttttttttaatctgtaaaaatggggattgtggcacttgggatcttttggtgaggagtgtagttacctggaaagctcttaggatagtgcctggtacatagtgattcctgcatcagtgtgagctattataattatgggaatagaaaaaggtgccaccctggacatccagagtggggagatgttttccagtcagggtccaggcaggccagctggagacgaagctgattagtggggaagcttaacttccaggagtggaagaatttaggaggagtaaacagaatgcacaacatactgtaaacattcctttacccaacagtaggaatactcagagtgggtgtgtcttccgtggcaatcattatctcctgggaatctaagaatgtgtcctagagtcaaatggctttgatgtaagccaaacccagaaatgggcttcagggctgccttgcacatagcattcattcatcttgaaaaaggaaagcattcatcttgctaaaggaatcccctcttctggcccagaccattatttttgtttttttactatcctaattttaagatgtaaggagaaagactgaagaacaaaataatgaagtacatgaatgaaataacagggtagaattgagactggtatgtgtaagttaagagaaattgtgtataaattttgtgtgaacagaaaattgatttcttgttgcaaacagacctctctacataaataatacctcctgccttgagtggatagcagacctcatcacaagaacattccagcagagtcatgagagaatgggtagtgtggcttctttaattggcaggttagactgagtaagttactgaagagaaagaagttgaaggagaagatgggtgagggcaagaaaaatgggaaggtgaaaggaaaggactgaaaggaatgtttaccaagggctcatcaggtaccaggctctgtgactaatgtcttacacatgttaatttactcttccactgtcattttctgatgcggtaagagtcagtcttacactacaggtgaggaaagaggctgagggaggtcaaatgagtggcccagggtcatccagccacttcatagcagagctagtgtgtttcactgtggtttgtgcagacagaaaagtgagacatggaaggaaggcaaaacatttttgttgtgggtgatgtttatgaaagtgacccatatgaggcagaataatggcctcttaaaaatgtccacatccgggccgggtgcaggggctctcacctgtaatcccagcctttggaaggctgatacgggtggatcatgaggtcaggggttcgaaaccagcctggccaacatggtgaaaccccatttctactaaaaatgcaaaaattggctgggcgtggtggcacatgcctctaatgccagctacttgggaggctgaggcaggaaagtcatttgaacctgcaagggggagattgcagtgagcccagattgtgccactgcactccagctggggcaacatgagggaaactctgtctcaaaaaaaaaaaaatccacattctaactcttggaacacatgcatttacttttcttggcaaaaacactgtacaaaggtgatgaagttgagtatcttgagatggaaagcttattctggcttatctatgtggctcccagtgtcatcataagagtccttgtaagtgaaagggaaaggcaggaggggccgggtgagaatgatgaggcctgagagactccactggccgttgcttgctgtgaacatgtgtgataagacaaaattacaactaatttagttatagatgtaattggcttttatttgtgatttatgatttggggcagctctccctctacagatgcctcagcatcccaagtagctgggactatattgcaggatctgaccagaagcctgcaatgcaatggggctctttctttgttcccaggcagatcggcaggttgagaaataaaaggcacacacaagatagtgaaagccatatcgagaggggtcaccgccttctggtcctgcaatgctgccaatgcactggatataccagcatttattattaagtttagtgagagtggggataggttactgagggatttagggttatttataggctctccacaagggtcacattccattcccagagctatggacatctgcttttctgggataggaatcttggtaatgtgaaacctccctgactgcatgtccgttcataggctctctgcaggggtaagcacatcatgtgctgttagctcattctggcagcccaacctggcatttgtctttacacaatcctgcatgcagtttcatatttacaataatgaggagcatttcatcttttattccgtagcaatagtttcagggggtctccctacatctcccccttttctctgatttcaatgaaccatagcaatcatagcttggcactgatcacgattggattgaagaatattttttccaattttacacatgaacaataaaccaatagcacaaactgtctaaaacttcagcactgggtaaaacagttaagagtgcttgagaagcttcaaaaatctgttcttttagcttccttatgtctaaacttaaattatcttcacttccttgtaaatggcattttacgattcccaattgtgaacagactcattatattggaatggagttatacaaaaatcagaagtattccaatcacgttgcatttgtaatctatgttctaatctcataattctatctcccatccatataacagaagcacatcacgcgctgtaggctcattctggcagcccaacctggcattgtctttacacaatcctgcatgcaattttgtatttatcataatcaggagcatttcatcatttattctatagcaatagtttcggtgggtctccctacaggactacaggtgtgcaccaccatgcccaggtaatttttgtattttaactagagacagggattcaccatattgaccaggctgatcttgagctcctgaccttgtgatccacctgccttggcttcccaaagtgctgggattacagatgtgagccactgtgcctcgcccataaatcacacatttctttgagtttttgtaattccagcacaagagaaaccatttgatgtttgaagaatggctgcacacaaataaaaacatctgtggattgcgccacacgagggagactaccagtatgactatcaggaggaaaatatcgagtttggtatatacaccttaggcaagatgcaaaccaactacaataggatagatcaaagaagaagccagaagggtctagtcattttaaccaggcagcacatttaatgatttttacaactgactgtgtaatacccaatgtatttatccatatgcaataagaagtgtcagaaactgcacaggctccccccgttcagctgatagagagcaattctattatctagcattgcatgtctatgttaaattaaaacagggagtgagaataggcaagtatagaagtggaagcctaaaaaaatctccatacatttgaggaaaaagttgtgttacagatgcagctaatgtcagcctttgggtggattaaaggatctcttggtatgtaaaaatgtgtgggctgggtgtggtggctcacgcctgtaatcccagcactttgggaggctgaggcatgcggatcacctgaggttgggagttcaagaccagcctgaccaacatggagaaaccctgtctctactgaaaatacaaaattagctgggcttggtggcacatgcctgtaatcccagctactggggaggctgaagcaggagaatcacttgaacccaggaggcggaggttgctgtgagccaagattgtgccattgcagtccagcatgggcaacaagagtgaaactccatcttataaaaaaaaaaaaagtgtggttgacatgatatatctgacactgttaacttactctcagaagctacttcttgtgaaatcctaagtacagcattattctgggaagcaaaggagacaggcataagcaaggagaaattcagagaggtaagagtctcatcatgattgatagtcttgttctgacatcttgagaaaagctgtccacagtgtaaagtcatcaacttgttgtcgtggtttgcagtttgagtgtctctaagttatggtgttggacatttggtgagctcttagtggcccacacctcagacatgagggttttcccatgaaatttacattgagttgtccacctccaacttatatggcttcaggaacagagccactcttgttcttaatgatttcattggagaaaattgaattggaagaactaaaagaattcagggtccagtccagtctaccagtggattataaatactcaatgataatgaacagtggttcaatctggtaacaggtgtactacagtttttcttttcaacatagtttttctgtctataggagtctctatttttaccaaagataattccagtaggatgaatttgtttgcaaaataggttgagtctcaccgaacttgcccagattttttagctaagtgcggcaagagtagcaagggaccatagaggctctttttaaacttctctttgctagaagtttttaataagaatctcagattaaacttccaaaaacctcttgagactaggaagccaacccaaggcccgcttcagactttgcctgcattccctatgggtttattctatgtatattctcaaatataacatcccagtcaaagccttggtaatataaccaatgttttcaaatgtgtcctgttataaagagagcagattcttactaaacttgtgcaaataactttattaccataaacatatgaatattcatgaatagattcccaattctggggcactcagagagcaaaagcaaatgtttcaatttttgtttacaaaagtatactttaccaattgctgaagaaaaaaattcataaatctggaggataaaacattcaaaaaatcagcacattttccaataaaaaattatgaaaacattatccttttgttatttagtccaatgaaatggagttcttttcttctttgtcttgaatttcatgaaggtatcagcctgttcatcaaaattttgaaagttcttagtccagtggtatgatcttgaagttatcaggaacttgtattcaagagtccttttcatagtcttttccataaatctccttgaagaaaaagcaattttggactgtagctgattttaaatactttgaggaagaatcaaagcaactttctgggaatgacaaagatttaaaatgactatgtttaaaaatctaatgagaatttattatggtaaagacacagctcacatagaaatctagttacttctgtggcttatgacactatggtaacatatttgatttccagaaatttcatataatttttagaacactcatttttttaaattttttttgagatggagtctcactctgtcatccagactggagtgcagtggtgcaatctcagttcactgcaagctctgcctcccgggttcatgccattcttctgcctcagcctcctgagtagctgggactacaggtgcctgccaccacacccagctaattttgtttttgcgtttttggtagagatggggtttcactgtgttagccaggaaggtctggatctcctgaccttatgatccacccacctcagtctcccaaagtgctgggattacaggcatgagccatcgcacccagcctagaatactcatattattaacattcccataaatattatttagagaaggtttagcatcacttatcccttatttgaaaatgctttctatataatgtaatatataaaataaggtggcttttccattcagcttctgtttctcaagaggattactgagttcttggtgtagcccattcataaatagggccaaaaaggtatagtcttatgtatgttgaaaaagatccttaggtaattccagtacttctagctgaaaatcattcatttagttttaagttctacctattgcaacaagagttctccatccttgttacatgttagtagtgtcagggaagacttaaaaattaccaatgcctgggtccgtctccagacctttaaactggaactaatgggtggggcttgagcatcctcttttaaaaatgttttccagtgattccaatgtgtagctctatttcccatcagatttctctgatttcttgtggcattcaattttttctattttggtatcatgattattttcaggtctcatttcctgtcttaggctttgtgtctcctggggtggggcccttgccttcttcatttctgtatgttttttgaacacatgaactgatcatcaggaaaagatctcaaccacacataggttgtgtcctgagtctcaggttcacatgttaatcctaaagtctttgttctccacgaggtcagatgttgcttgtgatgaagggtgtggttaagtctgcagtgcagatggtggaagggatttcactctgtttttagacatagcattggaactaagaattttatgtctatatgggtgaaggggcagggatgtgtaggaagacagttctaattaggatggaggaattatactaggaagtagaggtaaaggaagtgagaaggcttagtaaatagaagaaatgtgaacttatcaaataggctagtgtatacccctggagattcttgattaagtgaattaactagattttagaaaggtaatgaggcagttatatgcaaggaacatttcaaagtctggagacaagaagtcaagcaatactttgagaagtggttgagctttatgggaatggagagaattacactattgagatatgttaaaaataatgaagaaggtttcaccatgtgaaattgtgtttctcatttgaatctgagaaacaaatgagcagaggctggagataattatgtctaaaagacagtggggtacagggagcataaaggccagggagaaagggaactgcaggaattagtgctgagaagcaggagttagtggatgaaggaggagatccaggcccagatacaggcaaataagtcatttccctctcccaagcatggcagtcagccctgcaggaaccaggataagagaaaaggtcatcatacctgccagtcttcctgaaatacaaaaatgacatcacggctgctacgttggattattgaaagcaaaagttcctaatcctggaggagctgtcatggaaagaaaagaaaagaaggaatgaaggtgatgttattttacatgggggagcgtcaggaacaagcatgtaacatgagatactgtataattgtttcttcaaggactacattatttctgttggaaaattgatgggagatgattatattcttgcagttttttttccctctcaccatgtttctcagttggtgatcagtcctctgtcaattctctactgcactcaggtattttggaaggctttcagacgtgagaaaggctgattgctattttctatgtcattggaacttgtcacctttgcaccttttcatggttgcatctttttctcagtgtctctgttgtggcagtcatgaatgagactctgtcagatctccatggcagggacctgattgacagaaggcccaggtcagtgcatttcaaattcaccacctcctttgcacagaaagcttctttcctacaggctcccaggaagggtgtgaaagcaagcctagttctctgaggctctctttaacgctaatgggtgactggttggaggattcctcatcagccttgcaaaaactcttagaattgcattggtacctaaaacttctttctctttctttttcacaggaatcagctctgcatagtggtctgtgggttctcctgtactaccttcatgcctgccccacattccctcacaggtgtcttccgtgataaattatcgtttaggtctaatcccgtcttggatgcatctcagttggtaaaaactaacataccaggcttgattctttgcagttagctctttatctttctctcccacaagtagtcagtagccttgttctagtgttttatgtgttacctctttttccatatatatatatatatatatatatggaaaaaggaaggtactgttgaggggcacttcctatgtgccaggccctgtgctaaatactttacctgtatctcatttaatccacacaataaccctgtgaggtagacattatttccattttgccaatgaaaagacagaagcttagcgtgctgtaaaaactttcctggtgtcatatggctagtgacaggtggatctgagatttgattctaggactatttgacctcaaggttaatgatgatgatagtaatatagtagctgacattggttcctctgtatgtggcatcttgtttcattgactgcatgaaacctttaaaagaatggtacgaagaaaacactctcattgcaattttcaggtgaggaatcagaggttcagagaagttgagtcttgtgcaagaaatttataactgtaaactcttacattaaaaaagaagaaagatctcaggtcaacaacctactttaacacttcaggatatgaaagaagaacaaactaaacccaagcacagtgaatgagggaaataataaggattagagttgatataaataaaatggagaatggaaaaagaatagagaaattaatgaaaccaaaagttgattcttcaaaataaaatcaacaaaattgacaaccattaactagattgactaagaaaaaaagagaaaagtttaaaattactcaaatcagaaatgaaaatggactctgagcatggtgggtcatgttttaatcctagcactttgggaggtcacagcagaaggatttcttgagaccaggtgttttgaccagcataggtaacctggggagatactgtctctacaaaaaaattaaaaagccaactagctgcgcatggtgacatgcacctgtagtcctagcatcttgggaggctgaagaaggagaattgcttgagcccaggaggttgaggctgcagtgagccataatcacaccactgtattccatcctgggctggcctacagagtgagagtctgtctctctctcttaaaaaaaaaaaaagaaagaaaaatgaagcgattactaccaattataataaaataatgattatgaaagtactataaataattgtatgccaataaattggataacctagatgaaatagacaaactcctagaaacacacaaaaatatgaataaaactataatcagtaacaagattcaatccataaaagcatttgatgaaattcaatattttttcataagaaaaacattctaagaatggaaggaaaccacctcaacataaaggcaatatgtgaaaaacccaatgctaacatcatactcaatggagaaagactgaaagcttcccctctatgagcaggaacaagacaaggatgcctgcttttgacacttttattcaacatagtattgaaaggtctagtcaaaaaaattaggcaagaattttaaaaaagacattcaaattggaaggaaggagtaaaattatttctgtttacagataacttgaacttatatgtagaaaatcctaaaggtggaacaaacttattagaattaataaataaattcagtaatgttgcacaatacaaaatcaacattcaaacatcagttgtatttcaatacactaaccatgaacaatctgaagggaagttaagaaaaataatttcaatttatattaacctcaaaaagaataaaatatttaagaataaccaaagaggtgaaatgattatacctgaaatctgcaaaatattgctgaaagaaatgaaagacaatatcaataaatggaaagacattttgttttcatgaattggaagactcaatattgttaggaggacagtgctacccaaagtgagctgtggattcaatgcaattccttcagaatctcagtgacatttttgcagaaaaagaaaaatctgtcctaaaatttatattgaatctcatgactctaaatagacacacagctttgaagaggaagaatgaagctggaggactcagacttcctgatttcagcatttactacaaagccccagtaatcaatacagtgtggtactggcataaaggaggacatagaaattaatgaaatatcatagcccagaaagaaatgcttgcatatatggccaaatgattttcatcgagtgtgccaagatcattcaatggggaagggacagtgttctcaccaaatggtattgggaaagctggatatccaagggcaagaagagtggaacctttacctaacaccatgtacaaaaattaacccacaataaatcatagatctaaatgtgagagcaaaaactatacaactcttagaagaaaagcttcatgatactggatttcacaataattccttggttgtaacaacaaaagcataggcaacaaataaaatcaataaatcggacttcacaaaaatcaaaaccttttatatatcaaagaacattatcaagaaagtaaaaaggcaacccatgaaatgataaaaatatttgcaaattatatgtgtgataagaaattaatttccagaatacatgaaaagctacaagtcaacaacagcagacatccaaaaacccaattaaaaaatgaacaaaggattaaaatggagttttatccaaggaaggaacacaaatatccaataagcccatgcaaagttcctcagcatcatgaatacttagagatatacaaatcaaaaccacaatgttacaccacctcacaaaatttaggatggttttgataaacaataacaatgacagcaacacaaaacaacaggtgttttcaagtagatggaaaaattggagctctagtgcattgctgatgggaatgggaaatgttacagccactgtaaaaattggtgtgctgtttctcaaaaaattaaacaatgaattaccatttgatccagcaattccacttctggacatactccccatagaattgaaagaaatttgaacaaatatttgtacactgatgtttagagaagcattactcacactagccaaaaaatggaaacaactgaaaagtccattgaaagataagtgtgtaggcaaaggaggtgtatctatacattgaaatgttattcaaacttaacaaggaataaaattccaatatatcgtgcaaaatggatgaaccttgaagatattatgctaactgaaataagccagacacaaaaggtaattattatataattccatttataaaagatagagtagccagttacatagagacagaaagtagaatggtgggtgctaagtgttagggggagaaggagtgagagttactgtttattgggtacagaggtttaatatggtaagaggaaaaagttctggaaatggatagtgtgatggttacataacactaaattgcacacttagaaacagttaatggtaagccttatattagatatatatagtgtctggtagtcttaccctctctataattacacactttttggcactgcccctttcctgccatgcagagccccaggggtgaatcttcctatttctccagctctgcatcagtcactgtactcagtgctgtgtcccacgtgctgtgcccacagcctcatacagccagtgacttcagagccaggacgcagctcaggagtctgccctgaggttgcttctcttcttatttccttgcagcctggcccgggggaggcttggcttgaactggcagctcaatttagccaaattcaggacaggccaccaggactctttctccacacatgctggtcccaccccaggttgagtgaggcagggccagtcaccagaggagcccggagcagagcaggaagcagagtctgagctgctcctccctcacccaaggggcttcctcctctcatttgggggaaaagtgtgagcttgtttcaaagcctcagatgttccttgtagttcatggaagaggtacaagaaaacaaagacgtgacagaaggggatgagttggtgacagtgagaagcaactcgatgttcagcactctccttcttgtccctctgtgaagcctcttctaccacatagggctcagggctgataaagccccctccctacctttctcaggccagacacaaggtcagtcatgagaaaacagaaaaaaaaggagaagagagtctgtagagacaaattgggagggttcaggaggagaatttgggatttgcctgtgcccatgggacacaggctgggaataaaaatgttttcctgactcttctctgaaagctagatagactccacctaaaaccctattgccaaggatgctgggatccacttaccaatgactctgattgtcaaggatgtggagctttcctcgccagtggctgagttacgagcagagcaagcatagagcccattatgctttggagtaatctgagggataaagagcttttgtcctgatagctgaaacttcccattaattgtccaagaatactgtgctggtgggttagagtttgcgaagcaggacaagtcgaggttctctcctgaatagtaagaggtgactgaagggaaaattctggggaggtctggaccatctggaggaaagagaataaagccacagttgatgtcatctgagggaaggggaagctccttgtctcttaaagggacacagtgaccctctgagccaagacacaccctcaagtcccagccaaaccccctctatgttcactgagctgaagcctgaagtattcacctgtttctcccaccacaagctgtgggccccaagtctcccatgacaagagcatcccctctccttatattcttggttaaggctgtgtctacccaagttttcccagggcagggagtcatggccacctcggatgtccaaaagtaaaggtgtctgtacttggaccggagagagactgagaggcctggcccctggtcgtttggatttaagctggtgtcctggcccacagaggaacaaaagatacagaggacattcagggtgactgagtcactgcggatgccaccatatcggtcccgtatttcacattgatagggtcctgtttcatttctcgtgacactgggtagaatgaggatcctgttttcaatgggtcgctttaccctgggactgaccgggaggctctgacaatttagccaccaaatgtaggcatagttctcactcttaggttcacaggtgaaggttaagacatccttattctccctggggtttaagttgttgatggtgatgtagggcatgggcagctttgctgtgtggataacagagagaagattgtcctgtgtggcacctttgattcctccacaggcatccttcaatcagagttggcatctcccacctctcagcccacccgagtccttgaaagccaatagctggtgcgtgtgtcacaagacagatgcatgatgatctaagggctcaaagactgtgaggccgcctgcttcatcttaggaaagcacagactttctgaagtgtcaattgagcagcagtgttgggtcatggacagatacgtcagtgggagtcacagcccctggtacccctcccagtccctccataatcagttgactggctggctcaccttgggttccttacctggaatgtgcaactgctgggccccttccaaattccatcctactttgcccccctagatgtgatttctctgcagcttccatttccaaggacattctagagatcagtaataatgggacttcccattgtcctgaaaccctgaagatactgagcagcctggcctgggactggatgtttcagcagaaataacacaggggagaccagagtcaagcctggaggtcagttcagtcatcaggcagtggaggcagaaagtggggcagtgttttgcaggtgtttcatgatgacttacttgaaccagtgacctctaaagatagagcagagcgcaaggaatgatctaggaagagtgaaggggataggcaagagctggtggctttggagcagaaccatgttccctgtcctgggtcctttaagtttcctttccttctgcagagggcaggtgaggaccatgtggatctttccagaaatacatgtggacatttgcaaatgcagaactgactggtggaaagggtgggaatgaactgctggaaatctggtcctcatggaccatatgtgtttgatggatatgagacaaatttggagaaaagttttgcaagtagtttctttcattggatattctactctctgatcccctgggttcgactactctagggacctcatgtaaatggattccagagtgaatatgagaagagactgctggttgccaggagctgggagtggggagaatcagaagttgttcatgggtgtgcagtttccgttatacaagttggggagtttctagagatctgctgtagagcttgatgcgtattgttcacacagattatttcttatgcataagacttaggacaaaaagtgttttggatttctgacattttttgattctgaaatatttgtcatatacttactggtttagcatcccaaatctgaaagattcaaaatctaaaatgcttcagtgagaatttcttttcagcatcagattagtagacaaaagtgggaagtgataagccaaatatattcttgcccttttttttctctcaccacatttctagcttggtgattagttttcggtgaattccatactggccatgctgcactcatatatatttgaaggctttgggatgtgagaaaggctgattgctattttctatgtcatcaaaactttccaccttttcatggttgcatctttttcacagtgtttctgttgtggcagtcattaataagtgcctgtcaggtcagatttaggacagagttttctaattctgcaaaaaatgttactgggattctagtaggggttgcattgaatctgcaactcactttgggtagtattgtctttctaacaatattgattcttccagtccatgaaaatgaagtgtctttccatataatgatattgtctttaatttctttcagcaatgttttgtagttttcaaggtataatcatttgacctttttggttaaacttattccaaaatattttattccttttcatgttaatgtgaattgaaattctttccttaatttcctttcagattgttcattgttagtgtatagtctaaagaatgatctagaaagagtgaaggggacaggcaaatgctggtggttttggagcagaaacatattccctgtcctgggtttttgattttccctctccctttgcagagggcaggtggctcttccctgatagctagatagacttccctggaaaacatagtgccaatgctccagggatccacttaccagggactatgatcctcttgattatgagatttgttccaccagtggctgagttatggatgaaacagacatagacccctctatatgttttagtgatttggggtatgaagaacacttgtgctgattgctggaacttcccaccaatcagccaagaatgctctgccagtgggtgagtgtctatgagacaggagagcttggggacttcccctgtatggtaataggtgtatgaggaagaaatggtgagggcatccaggccatctggagcaaagagaataaagtcacaggtgacattgtcagagggaagggaaaatcctggtctgtggaagggccacagtgaccctgtgagccaagtcgcaagactgaagtcccagccaaatcctcgctgtgttcactgatctggagcctgagacattcacctgtttctcccatcacaatctgtggaccctgagcctcccatgacaggagcagcctcttttctcccactgtggatcaagcctaggcctactgtggtttgtctggggcagaaagtcatggccagctttgatgtccagtggtaaaggtctctgtacttggacctgagagggactgagaggcctggcctctggccatgtgtatttgggatggcagcctggctcacagaggaacagaagatactcacggaggagattcagggtgactgggtcactgcggctggcactccctgagttccatatttcacattcatagggtcctgcagtatactttgtgacaccaaatagaaagagggtcctgttggtttcagacagctgcatcctatgagtcatagggaggctctgaccattcatccaccacaggtagcttgcgtccggagtctcaggattacaggttaagatcacagtctccatggcctccctggggtttaagttgctgctggagatggagggcttgggagtctccactgtgcagaaaacagagagaagattgccctgtgtggcacctttgattcctccaaaggcatttttcaatcagaattggcatttgccacctctcagcccacccgagtccctaaaagcccatggcaggtgtgtgtgttacaacacagatgcatggcattctgaaggctaagagattgtgaggctgcctgctttatgtgggagaagcacagactttctcaggtgtgaattgagcagcagcattgggtcatggaaagacacaggaccagcagtcatagcccctggtgcctctctgagtccctccatctccaactgcctgcctggcccaccttttggtcctgacttggagcatgcagtgctggaatcttcttagtttcagtcttacttttccccccaaggtatgttttctctgcagcttcccttgccaaggacatcctagagatggatgatggaacttcccattgtccttaaaccctttgggtactggaaagcctggcctgggactgggtacttcagcagaaataacacaggggagaccagagtcaagcctggaggtcagttcagtcatcaggcagtgcagccacaaggtggggcagttttcccaggtgtctcatagtgactgacttgagccagtgacctctaaagatagagcagagtccaaggaatgacctacaaagagtgaaggggacaggcaagagctgatagctttgaaccaagaccatgttccctgttgtgggtctatgatgctcccttcccccagtagagggcaggtgaggaccatgtggatctttctggaaatacatgtggatgtttgcaaatgcagaactgactggtggaaagggcaaacatgaactgatgatggaagtctggccctcatggaccatatgtgtttggtagatattagaccaatatttgggaagaagtcttgcagatactttctctcattagacattctaccctctgattctgagtttgactactctatgtacctgatatcagtggattccagagtgaatcagagtgtagaatagtagtttccaggagctgggatcaggggaattgggtgttgttccgtgggtgtgcggtttcagttatgcaggacgaggaggttctagagatctcctgtacagattcatgcctatagttcatacagataaagtgcttcttatgcagaaaggttaaaacaaagtgttttggaattctaattttttttattttggaatatttgcagtacatgtactggtttagcatcccaaatctgaaaaatttaaaatccacaatgcgccagtgagcacttctttttagcatcacatcagtggtcagaagtgtaaagttttggagcatttcagattgtggatttctggatttgggatgctccatatttaatactgtaattatcccataaaaagttgtcaggagattagacctcatgttgtgttctgactctagtaacaaaaaaaaaatttggaggaaacattaaaatgttttcataagtggaaatttttactgatggtctaaacatctaagatcaattgctggtagtagtatttctcttgagaccaacataaggtttaggtgtgccatgaattccagcaggatcacattatgctcaaagaaagatgccaaaggtgatttgaaattagcagctccttaagtagagagagtcccgttaaaaggacagaactggtcagtgcatcaattacataaaaggaggaaggatgccaaattaaaagaagtgatgtgtgttatgttagtaaatatagaaagaacttcctgcttctaatttctgtgcagttaggaaaaatggggaggaccccaaaacaggtatgtgaaatgctttcttcattttctgttaagctcaggaaacaccactagagtttaagtttgtgtgaattagaaggagtctaagtgagatgccaatggctcatgtgtctccccacacgaagaactccaacttatgaaaacggcatcatcatgaggaaacagttgtatgtggcacaggcagtaaaaccatcagatagcacccacctggccacctccaactagtccccaaaaccaccagtattcctcttaagtatgtgttacagcctttgtagttgtcccacagctacaaaattttaaaaatgctattgtcaaaacaaaatattaaatatgaagttgaatatgttgatccactttttttccctactctttttggactttcctgtttcagttttggaaatttctattgacacatcctcaagctagggattccttcctcagctgtgtgcagtctaccagtaagcatcaaaagaattcttcatttctcttacagcatttttattttttctgagagagactcttgctctgccaggctggagtgcagtggcatgatctcagctcactgcaagctccacctcccgggttcacaccattctcctgcctcgacctcccaagtagctggtactacaggtgcccaccaccatgcccagctaattttttgtatttttagcacagatgggctttaaccatgttagccaggatggtctccatctcctgaccttgtgcctgccccagtctcccaaagtgctgcgattataggcatcagccactgtgcccagccatctcaaagggattttaatgagttgttgacttttgagtttgttcagctttttacttagtgttagaaccgagtgacaaatttcaagcttgtcatatgcctgacacgaagccagaagtctctaggaagtgatcagagaatgtaagctccatagcacgttgacgatggagtcatgagtgaaacaggtgaaatgagctcatgggctttggagactgcaggcctgtccagcctctgacaccctggtgagtcagtgcagagattacaacagtgacagcaaactagcatggctgactccatctggcatctagtctcaggctggctgtcctcactcattcctgcacatagacaaggctaaccttgggagaaatttagtttatggtttaactttgaagcaagaatgataatagttcctccataaaactaacacccttactttgcccagggactgcctttgtcaaactagtgaaagaccatgagatttagattataagagggaactgaattctgctaaaatgtatgcacagtttctataatccctgactgctgcaatgtcatttggcaagggtttacaaaatttgtaactaattgctcctatagataacatcactattgtagaacgtgagattggtcttttgagatgcttctcattcttttgcattctggcaaccagctgacctcatccatacctatgactaatggctcagcccgtcatgtggtccctacctagaggcagattcaagcacaaacagatcatttccctccgcccgcatgattccatcaccaacaatcagcagtactcattttttagtcctgtgcccctgaaactatccttgaaaatctctaagccctgatccactggggaggctgatttcagtaataataaacctctgtcctcctgtttggcagacttggagtcattaaaatctttctttactaaaaatcaccatttcaataaatttgtgtgtttgtgtgtgtgtgtgcaggaggccagaagaacttgtctgacaatgataagagtggttggagggacttcctatccctgtcccatggtcttgtccacaggtcagcctcacaaaggggaagagcccttgatgggaatacagtggaagctcattctcttagtgacctggggacattggctcgagatgaagcctggcaggagtggcaactccaggtgatttctgcacctttcctatttcctgggaggtgggccaggccacagtgttagcgggaagggaatagaacagccagcctagttagagggagtgtctggggaaggcctaggggtgggggaagaagctgtgcaggacagggcttgccagtcagaatgaagtgggaggaagatgagggacacagagaagcagagagaggcagagacaccatggcagtgagcagtgagggagacactgacttcagagcccccaggaaccagctgcccccagttccacagtccaggaccaaggagccccgagaaccctctggtggccaaagagcttcagagttacatgaggtggggtggctttaggggcaagaggtagtggggggatgaaacatgggtgtcagcctctgaaggacaagggacaggtgtggctagaacctcctaggattctgcattcaagatccagtctctaaagaggttttggatcattcatttcttcattccattccttcatttgttatgtgagagctcctgagtgtgtgtctctcgctgggcctgtgctggtgtagggagtgagtggggaaagaaaacaaggtcctctccttgatcctctcatgacagtgacatggacactttgggaaacacagagtttcaggttcagtgatgggggttaagatctgagggggaggcctggacattttttttgcactgactttgatggttgaagcaggtgatttagttctggagtatagactaatcagctgaccatttgctctcactcctctgaggtttggatgcctaagaagagaggatttgagccaataaatgactatggggtgcttggaacccagtaagccctcacttctggtggaggagaggatgggcctgtggctgcagacagacctcatgtgaccctgatctcccctttgcgtttgtgtgactctgattcagtgactgtgccttcctgtgcctcagttttctctcaatcagataagttaaatggcaaatggactgtggcttttcatgctatctgtgaataaatgttaaattattcacagtcacctgacctaatgcttggcacagtggaggtgttcacacaagcagcatttattattaatttgcttccatgagaaagcacctttacgtcagatccctgtggacaagctgctaccaggtacatcttctctcttctgtttctgcttctgaggacattagactttctatggactgtcctaagcctcctaaggcagttggctgatgacctacaaagcttgtctttctgtcctctccactctgagtgtcaggtgaagaaagctctgtccttgcccagatgaggctctgagggctgagccctggctggtgaacagctccaggagacacagtcctcagacagctggtaaattcttggtcccagtaagccctgcccaagaagccacaacccagccctggaacaggctcctcagctttatctggaacaaggatttaggtacagagttctgggtttgaggcttctagggctgagcttctctgagagtatctcaggggcccctcaggtcaaattctactcagttctccagggtctttctcagggtcaaatttatgaagagggcatgaggtgcttggctgagactgatctcctcctgctgagtccccccatcagactgtccttcctctgcagcgagtgtctgcagggtctggatgcgggaaaggaattctgatctgttgaaatttgtctcctctgtgtgtgtcctgcactaaatgcccaaaccccagcatgggacataatgcagagagggacacaggcaatgtccaggcctgacaatcctgtgtgtgtgatgtagaagtgacccctgtcccccaacacccagggatcatgtggaatcacttacggtataaggtgaaggtgaaatatccagttactcctctagtcccatcacctcgctttatgatgtgtaaggtgtaggatcctgcgtcctcccgggtgacattctggatcagcagggatgcattggaatatactgtttctcgtccactgtatgccggtccatatataattatttgaccgtctactacatatgatgtaatgtaatggtagaggtccctgatttgccctttgtaccagatgtagccagtaagattctggggcaaattgtggacaagtagaagaacatccttcccctcggacactttgggtggctgggcttcaatcatgacttgggcagtggtaggcaagttccagaagtttaaaagtaatgctaggaggtggagagagcatcagtcaatattgagacctatgtattggggtgaaaagatggggccctgagtcctgagaaggtctcttcaatcctcagccttgaagacacacacacacacacacacacacatacaaacatacacacacagaaaaggggcatgtgtgtttgtgtatgtgtatgtgtgtgtgttctactgtcctactaggtcaaggtcagcagcatgacccccattccttcaacacttctgaccttggcatttttctgtttggaatcctcttccccaggggtccgcatggccccctccacactgccctcaggtcctgctcacatcagggcatccttagacttctttcctgacacctccttcagggactctgggtcttccctttctgacctttccctgctctgctccctccagggttcttgtcaacacctgacctcacattctagatctctttgcatgtctgacttcctccccatggcagcatgagctccgtgaggacagggacttttgtgatcttggttgcaccccagtgcctggaacaggctgcagactcctgtagatgtgagagttctcagggccgtccacgccctgggtgtttttttttttttccccaattgttgaggttttttattgaggacagtgtttcatgccctgtttatttttatttgtagtgtcatctgatatagttattattatcatttttcaaaatgtggtggcccctgatgattaatcaggaaaacagaacacctgtttcctacctcttaccaattccggttcaatgtgactttcctgttttgacccctgtccctcttgggtgtattttcccctatccaggcatcaacagggccttctttcctttttttttttttttttctctttttttttttttttttttttttgagatggagtctcgtactgtcacccagcctggcgtgcagtggcactatctcagctcactgcaacttccgccaccctggttcacgtgattctcctgccttggcctcctgagtagctaggattacaggagcacaccaccatacctggttaattttttgtacttttagaagagacagggcttcactctgttggctggactgatcttgaactcctgatctcgtgatccacccacctcagcctccctaaatgctggcttttttattttttagaaccccaggagcctctccaggagaccccatccagtcactctgcttcctcctcctgtcctctcccaggaagttctctcctcacctgtgagcaggagccccttccatttgatgtgctctgtgcagggaggggctgagaggggccccatgatctctgctgcgtgcatgttctcctctgtggagatgagcctaggatccagaagcttccagagcacggctgtcagctgtgctgtccttcctccttctgcgctgagactcttcccggtggaaggagcacttctcaagctcatgggcagggtcaggccgaggacacctctctgtcccctcctctctcagccctgcctccttgtccctccttctgtttttccttttgtctgtgtttcaggtccctgggaattgtggaggcctctgcctttttcagcagtgattctttcaccaaacctcaatacacactttgtgcggacacacacatacacacacacacagaagagacacacacagacccacacagtcagacacataccctgcaggttgggcaagcagagtcctgggcctcagcctcctgctgtccccattgctcttggtcggggtgcacattcacaccctttgccctctttcatccccgtctggctctccccttcagtgcaggaggctggagctgcaccaggtccctgtcagagtgacaccccattgtgctgtgggtgagctgtgtgttgcctggtgagagggacccttcttttctccaatcgtgtctagcttggctgcagcttccaaggatggacattgaggacctgggtttcccagaggaaactgtccttcctggaggtgtgcagggtgaatctttcatgcctcctgggaggagaggcctgtgctggttgctcagtgggggctgtgagtcccatagtcaaagggaaagttctcggtcactctgtgactccatggggtctggcagctgagctggagctcttggtttctcatgttcttcctgacaatctttgatgtcctttcttctctgccgagctgattgtcctgtggtcaccacaccttccccgtggtggtgcaggaggaagtggggagttacccaggaatcccgcgggacatgacttattgagacgcaggaggaggagcctgggacagagcaggggttcagagctggagagattcatcccgacttactccgtggccatgatgggctcagccctccatgtgctgagatacccaggggtctgtcctgagggttttgacctggccaagctgctgtgtgtagaggaggaacaggcagtggccagagatcctgtctggagggacgtagctcacacctgagagggcgggtgggggtgagttgtgttctgggagcaaagagcaataacaccccccttctccccgcaagcacacgggagacgtctgtcttcccaagagacagctgggggtaggtggccacatcccggatggtgcctgtgtgtgaccatcacacgcgctctgagccctccggggttcagtgagcaggcaggtcacagggtgcctggctgattcccggtgaggctgtgggccctcaggcagccgctattctgtgtcagcgctaagcttggcctgggatgccccagtgaacaggacagatggagcaggggtgggcatttagggagcagtgacagaaagagttgatgttgatggagggaggtcacgaggggaaagcgcccagtgtggcatcgcgtgcaccagcgctgccctgggagatgcctttagctgggcccagggaaggagcaggtgtgtggggcaggaactacctgtagggggagtggtgttaggttggtggcccccaggtcagggaggagctgacagagaccctgtggggagcatggagggcgctgaggacttagtccgaagtgaccctggtgagggtggaccctgctgggctgtgggttccgctgagggcggttggcatcccttgggaagactccaggccgggagggactctgtcgccttctggtggacagggagggaagtgtgaacggcagcaatcccaggccaggctgcatgttttattctacgtggatctgcacacttcacacaaggtcacacatatgttatgttatagctccttcaccttccagccccgtgagtcccagtctgtgtggctctacgttcactgttctccctctttcacgatcagatatcccaaacgcagatgtttgtcactttctgtgagtttgtgtttgtgtgcagtaggcggcactgtgtataccctgggggcagtgatgtctggggctgagcgctgcacttgggcttgggagaagaagacggagcagcagggtgggaagatcaatgtcaggggggcagggacatcattttcattttctcccagggaccagaacccacgattttgactccagggcacagtaccacaccctgctggtgtccctggatgtcatgatgctcatagtgtcatgttgccttggcattcattttttaagttgtaagtttatttgcctcaaatcagaggcagggcttggtcaccatggcagttttcaatactgtatctggttcaggtggctccagttggtgtccagagataaaatcttagaggcatctctcctgcttggtgtgctggactcccctctctccagctgctttctttaaactgataattctgacattcgccctcatatttaaagtgaccacctctcagtcacagcgtgagctcctggtcccagtgtttgctgctttctttgaacacatccattaaagctccctgctggaaatctgtcatataacaccctggacttaataaagccattggcttaccagtctcttctctcctccctgcctgggctcactgaactctgtgtctgcggtctccaggtgtgccgagtgctccctagtgtctgtaagtagtaaaaatactgacattttcactttgtggttgtatcattgtagcctcacatgccatccagaggctgacattgaggctgccctatgggacctgtgctggttgagcctctgctggagctcttgttttggggcctctggtactcctggggacaggagcttccaggtaacttgattgaaaaactcatgcctttcattgaaacactgggtcagatgatgtattcatgggcttcagctgccataacaaatgccttagcctgggtgaattacataacagaaatctatttttcacagttctgtgaataatgtgctattctaaccactttaagatgcacaatcaagtgaaattaaccacatacacagtgttaaattaccatcaccactatttttcctagaaaatttttatcactttaaactgaaactttgtatctttcaaacaatacctccctgtatgttccaccctagactttgatcatctctactctgtctctatgaatttgcctattcttgatgtttcatataaatggaattatacaatgatgttattttgtttctgacatatttcacttagcataatgtttccatagtccatgcatgttccagtgggtgtcagagcttcattcctctttatggcagattaacattctgttgtatgtgtcaccatatttatttattcatgcattgatgagcacttggattgttttcatatttaatcttttgtgaataatgctgcaatcaacactatcatgcaagtacctgtttgagtcctggatttaattctttgggtatatacctaggaatggatgttgtttcaaatgagaattatatgattagctttttgaggaacagcaaaactgtttctcctagaggctgtacctttttatattctcacgagcaatatatgaggattccaaattctacataatactgctacttgttatttaacattttaaaagaatggtaaccagttttgtagatgtgatgtggtgtctcattgcagctttgactttgtgttttcctgatgactaatgatgttgagtatcttttcatgtccttcttgactctttgtatatcttctttgaagaaatgtctatttgactcttttgcccatttataaattggatgatttgtcctttctttattgagttgtagctagttctttatattatctgaacatgaaaactgcctatatgtggtttgcaaatattttctctcattctgtgtctattaattactttcttgataatttcctttgatgtacaaaatgctcacatcttgataaagcccaatatatcttgtttttcttctttctcatgcttttgtatcatatctaagaatccattgcacatttgaggtcatcaatatttacctctatgtctactttgagatgtttttatggttataggtcttatatttaactcactgatcaattttttagggaattgtttgatacggtgtgaggtagagttatctaaattcactgttttgcatgtggttatctagttgtttctgcactatcattagaaaggagaattgttcctccattaagttgtcttgacactctcttcaaagactaattgaccataagtgtgagggtttgcttctagactctcaattctatcccatttgtctttatgttcattcttttgccagcagcttgttttaataattgtactcctttgtgagatttcaaataagaaagttcaagtcctacaatttattttggcaagattcttttggctattcagggatccttttttgaaaggtggggaggcgaatgtttcaccattgggaaagccttttctgtcttcttcatggggaaatttgggagagccttttaaaaaactttatctaagtaggtaaactgtcaccactttatttgctgaagtgctatgttaaagtgtgccttgcctcttgtggaagaattgtgagaccctggaagcacttgcccacgtggtgagagacagtgagttccacgatgaggggcagagaggacattgttttgggatacaatgttgttgggggaggtgtatacatctcaacttctttatgtctctgtgcagtgggtgtagggagcagccccacagggtcggtgggtttttctccccatgtgcagagatgagagattgtagaaacaaagacacaagacaaagagataaaagaaaagacaactgggcccgggggaccactaccaccaagacgcggagaccggtagtggccccaaatgccaggctgtggtgatatttattggatacaagacaaagtgtcaggataaggagtgtgagccatctccaattataggtaaggtcacatgggtcacatgtccactggacagggggcccttccctgcctggcagccaaggcagagagagaaagaagaaagagagagagagcttacagcattatttctgcttattacagacttttagtactttcactaatttgctactgctaactaaacggcagaggcaagtgtacaggatggaacatgaaggcggactaggagcgtgaccactgaagcacagcatcatagggagatggtgaggcctctggataactgcaggtggacctgagtaatgtcaggccctccacaagaggtggaggggtagagtcttctctaaactcccccagggaaagggagactccctttcccagtctgctaagtagtgggtgtgtttccttgacactgaggctaccactagaccaaggtctgcttggcaacaggcatcttcccagattctggcgttacctctagaccaaggagccctctagtgcccctgtctgggcataacagaaggctcgcactcttgtcttctggtcacttctcactgtgtctcctcagctcctatctctgtatggcctggcttttcctaggttatgattacagagtgatgattactctaatgttggaataaaaagtaattcctaccaactaatgattaatgatattcacatataatcatatctaagatctgtatctggtataactattcttttatattttatgatactggaacagctcatgccctgagtctcttgcctcagcacctgggtggcttgccgcccacaagtgggcacctccattggacacagtaggttttgaaatccttgtttatcctctggggtctgggtcttggcttacctgttagctgcagctgaaagaggtgtctgctaaggcaatgacacctgtggggagaagaagggttcagcagagtgaaagcagctggggctcagaaaagccaggaaagtctgactcttagaaactgtgggttagcagatgggtgtcctcaggggtaaatgggccatgccagtagccactgcagtggactggaagaaggtaagtgatgctgggtatcccatgttctgtctcagctctgcagctgaagatttgggccctatgctggtacggccctgcagcaggggaagggtacacaggaatggctgcatatcaggaccaagtccatgtcatcttcttaggcattgttactgcagatggaggattctgttcagagacctggcctggacacatgggagggcccaccccattcttttaaaattattttaagagaacagtattagcaaatgtggtacatgttttattctgctagaatcagcattactgtcacgttttacaacgtatctcttaggaaatcatgagagccatccacacaatgtggatttaaaggggactctactataatttcagctttcctactctttatagaaaccatcttctctgcaaacacacaggcaatatctctgtgttcatttctattgggagccctgtatgcaaggtggagagagccacatttccccgtgagatgttatgtaaaagtttgaggttgagatgacatatctgacactctgttgttaccctcagaagctactacatgtgaaattctaatgactgcattatcctgccaaatgaaagaggcatgcatgagcaaggacagttaagaggggcgagagcctcatcatgatggggagtcttattttgacatcttggggagaactgtccacagtgtgaagtcatcaacttgttgtcctggtttacagtttgagcatctgttgttatgctgtccaacattttggtgagttctgagtggctcacacttcaggtacaagaattttcccatgaaatttacattgagttgtcctcctcccacttatagggcttctggaacagagtgggtcttggtcttagtgattccatgggagaaaatggaattggaggaactagtagaattcagggtaatgtccagtctacaggtgaataataaaaacacagaaacaatgaacagagctgcaatctcataaccggtatactacagtttttattttccacataatttttctctctatgggcatctctagttttaccaatgataatttcagtagaataagtttgtttgcaaaataagttgagtttcttcaaacatagtctgattctttacataagtgcagcaagagtagcaatgagccagataggctctcttttaaaattttctttgctctaagtttttataaggaatctgagattagacttttacaaacctcttgagaataggaagccaaaccaaggctgacttcagactttgcctgcagttcatattggttcattctaaatatattcttaaatataacaacccagtcaaagccttggtaatataacaaatgatttcaaatatgtcctgttaaaaatagagcagattgttactgtacttgtgcaaatatgtgtattaccttaaacatatcaacactcatgaatagttgcccaattctggggcagtcagctagacagcaaaagtaagtgtttcaattattgttcccagaagtatagtttattgaactgctataagctatagatagattaaaaaaattccatgaatctagaaaataaaacatttaaagaatcagcaaattttcaaataaaaatcttaaaaacattatcctcattatgatcaattatttcaatgaaatcaatgtttttcctgcttggtaggcttagaattttctgaagatatcagcctgtttgttaaaggtttgtaagttcttagacagtccagtggtataatctgaaagttatcagaaacttgtattaaagtctacttgtcagcatcttttccataaatctccttgaaaaggaagcaattttggactgtagctgattggaaatgctttgaggaagaataaaaacaacgtgtgtgaatgacaaagattttaaatgactatggttaaaactctgatgagaattcattatgataacacagctcacataaaaagttcgttacttctgtggtacatgacattatggctgataacataattaatttctaggaatctcatacaatttctggaacaatcatatcagtaacatatccataaatataacatagagaaggtttagcttcctttactacttatgatttgaaaatgcttttcagataattttacatgtcaaataaagtggcttttccatgtagcttgtgtttctcaacaggattattgagtacttggtggaggacattaatgaatagggccaagaaagtataggcttatgtatgctgaaaaatttccctagataattccaatactcccagctaataatcatgaaattaggtctaagttttacctattagaacagctgttctttatcctggttacacattagtagcatctaggaagacttaaaaattaccaatgtctgagtctcactttagaccattaaattggatcctatgggtggggcttgggcatccatttaaaaaaacgttttccagtgattccaatgtgtagctgtatttcccctcagatttctctgatttcttttggcattcacttttttctattttggtattataattatttttctggtcttatcatctatcttaggctttatgttccttggggtagaaaccttgcttcttcgtttctgtatctttcatgaacgtatgagagggtcatcaggaaaatgttttcagtcacatgtaggttgtgttctgagtctcaggttttcacattaatgctggagtcattgttctctgggaggtcagaggttgcttgtgatgaagggtatgggtaagcccataatgcagatggtagatgggagatcaccctgtttttagccatagcactggaactaagcattctatgtgtatatcaggtggaggggaagggatgtgtagaaagagagatttagttacaatggggaattactctagggaatagaggtaatggaagcaatacaaattagtaaagagaagaaatgtgaacttatcaaataggcaagagtagatccctgaagatttttgaataggggagttaactagaatttaggaaggtaataaggcagtcatacacaaggaaggtttcaaaaactggagataagtcaagcagtacctctagcagttgttgaggttgtgggaatggagagaatgacacaagtgagagatgttaaaaaaaggatcaagagggtgttataaggtattgaatctgggagacaaatgagcagaggctgaggataatcatttgtaggagacagtggggtacagggagcatgaagaacaggggagaagagacctgcaggaatgagtgctgagaagcaggagtttagtgggaggaggaggagatccagtcccagatatgggcaaagaagtcctttccctctcccaagcatggcagtcagccctgcaggaaacaggacaaaaggaaaggccatcatacctgctagtcttcctgaaataaactacaccagggctggtagatcagagccacactggccagtactccaatcatgatgctgacagtggctctacctgaaaggccaggacaacttcctttcactgaagtatctgtcatggaaagaaaagaagagaaggaataaaggtgatgttattttacagtgtggtaccttaggaaccatcactaagtatgaagtagtttctacttgttcctttggggattacattaattttgtgggagggttgctggtagatgattagccaactatattcttgcagattttttctctctcaatgtgtttctaggttagtgatcagtcttctgtcaatttcatcctgaccttgctcactcagatatttttgaaacctttatgatgtgagaaaggctgactgctattttctgtgtcattagaactttctacccttccatggttgcatctttttctcagtgtgtcagttgtggtaggcatgaataagactctgtcaggtctccatggcagcttgtgtttctcaagaggattactgagttcttggtggagcacattaatgaatagggccgagaaagtataggcttatgtatgttgaaaaatgtccctaggtaattccagcactcccagctaaaaattgattaattaataatcaattgacttgattgacagaaggcccagatcagtgcatcccaaaatgacaacctactttacatagagtcctcactttcctgaagctcccagcagggaaatgaaagcaagcccagttctatgagcctctgttttattctcctgggtgactggtgggaagactccccatcagtcttctcatgctctgtttgaactgtagctaaatcttctttctcttttgccttcacaggaatcagatttgcctagtggtcccaaagctccccaggcttttttcatgcctgccccactttccctcacaggcatttttcctaatacattatcctgcatgtctaatctcatcttggatgcatctcagtgggcataaactaacataccaggtttgatttttttgcacttagcttttttctctctctcccacatgtagccagtaaccatgtcctagtgttttatgtgttacctcttttttcatgtgtatagaaaaaaatgtatatttccatatacttatttatacataatatatataataaaatatgtaatataaaatgtataataatttaaaacatatacatattttctatatatgtatatggaaaaagaggtaacacatgaaaaaccaggacatttacatataataaaattgacatatgttatatatgtatgtagtgtctggtagtcttaccctctctataaatacacaatttttgtcactgccccttccttccttcccatgcacagctcccatggccaaatgtccctatttctcaaagtgtgtgtcactcactgtcgtctgtgctgtgtcccatgtgctgtgtccacagcctcctagtgttttatgtgttctctttttctatatatatggaaaaagcatatacatatttctctctatagatttatatacaatatataataatctaaaaatatagaataacaatttaaaatatgtacatatttccatatctatgaaaaaaggtaacacataaacactaggccatttatatataaaatccacatatgtaatataaatgccaattttatcatatataaataagtatatacaagatacacttaacatatataaggtaaatttggaatgccctgaccagggccctctgtcagtcaagtccctgccatggaggccattcatggctgccacaactgagacactgagagaaagatgcaactatgaaaaggtgaaaagttctaaagtcatagaaaatagcaatcagcctttctcacatcccaaaaccttcaaaaatatctgagtgcagcatgtccaagatggaattaaaaacttcaatcttcaaaaggaaaaaggtagctggaggactcacactttcagatttcagcatctactgcaaagctacagtaatcaatacagtgtggtactggcataaaggaggacatagaaatgaatgacagggaatagagagcccagaaaaaaagcttgcatatatggccaaatgatttttgtcaagagtgccaagaccattccatggggaaaggacagtctttttaacaagtgatactgggaaagctggctatccatggacaagtatgagttgaacctttacctcacaccatatacaaaaaaatgaacccacaatggatcaaagacctaaatggaatagtgaagactaccagactcttagaagaaaacataaggaaaaagcttcatgatattgaatttcagaatgatttattagttacaactacaaaagcataggcaacaaaaaagggattaattgggcttcatgaaaattataaatatttatatgtcaaaggccattatcaagaatgtaaaaaggcaaactatgacatagggaaaatatctgcaaatcatatatctgataagggattaatttccagaatacatgaagaacactacaaatcaaaaacagcaaaaacacaaaagcccaattaaaaaatggacaaaggactaaaatagagattttattaaagaagatatacaaatggccaatgaggacatgcaaggattctcaatattactaatatttagagatatgcaaagcaaaaccagagtgatacacgacctcacacacattaggatggctttgataaaaacaacatgaacaacaacatcacgaaacaagtgttttcaagtacgtggaaaaattgaagctctttgagtattgctgatgggaatgggaaatgttatagccattgtagaaaaagtggcatggcacggccggctcatgcctgtaatcccagcactttgggagccgagatgggtggatctcttgaggtcaggagtttgagaacagcccggcaggcatggtgaaaccccatctctactaaaaatgcaaaaattagctgggtatggtggcatgtgcctgtaatcccagctactcaggatgctgaggcatgagaatcacttgaacctgggacgtggaggttgcagtgagccaagattgcaccattgcactccagtctgggtgacagagcaagatcctgtctcaacatcatcaacagaaaagaaaacggtatgtcagtttcttaaaaaaattaaagcattaccacttaaaccagcaattctacttctggacatacagccaaaagtattgaaaaatatttgaacagatatttgtacactgatgttcacagcagcattattcacaatagccaatgggtggaaacaaccgaaaagtctattgaaagataagtggatgaacaaaaacatatatccatactttggaatgttcttcaatcttagcaagggataaaattttgacacatggtgcaaaatggatgaaccgtgaagacattatgcgaagtgaaataagccagacacaaaaggataattattatatacttccatttatgtaagatagttagaatagtcagttacttagagacagaaattagaatggtgattaccaggggttaaggggagaaggaatgagagttatcatttattgggttcagaggtttagtatagtaggataaaaacagctctggaaatagatagtgttgatagtaacacaacagtaaattgcactcttagaaacagttaatagtaagtcttagatacatagtgtctggtactcttaccctctctgtaagtacacactttttgtcactgttccttccctgccatagagagcttctgtgagttaatctccctatttctccaagtgtgcatcactcactgtcctctgtgctgtgttccaggagctgtgtccacaaactcagacaggcagtgacttcagagccaggacacagccctattcccattttttaaagccttacccatgggaggcttggcttctactggccgctcgatttagccagattcagaacaggccacccaggcaccttatccacatgccctagtcccagcccgggtggagtcagggcagggtcggtcacttggcgagcccacagcaatgcagggagcagagtctgggctgcttctccctcaacaaggggcttcctcctctcatttgggaaaagggtgggcttgttttgaagactctgatgttcatcgcagctcatggagtacacacacacagacacagacacacacaaaggagacagaagggatgttttggtgacagaaacagcttgaccatgaggaccctcctctttctccctccatgaaggcccttatactgcatagtgcttggggctgataaagccatttccctacatttctcaggctggacccaaggtcatccaccagaaatttggaaaacaaagggaagagaatctgtagatatgaattgggagtgttcaggagaaaaatttgggatttacttttgtgcatgggacacaggctgagaataagaatgttttcctggctctttcttggaaagccagataggcttcacctgaaagcgtattgccaatgctccagcgattcacttaccagggactgtgattttcttggttgcgaagtttttgccattagtgactgggttatggacataacacagatagtccccactattctctgtagtgactagggggataaagagctcttgtcctgtttgctggttattcccattcagcagccaagaatactctgctgatgggttagagcccatgaggcaggagaggttgaggtttgaccctggatagtaataggtgtctgaagaataagttgtgggttcatctgggccatctggagcaaagagaataatgccacaggtaatgttatcagagggaatgggaagctcctggtctgtgaaagggacacaatgttcctttttgccaagtcacaaccccgaagtcccagccaaacttcctctgtgttcactgaactggaggagtctaagacattcacctgtttctcccatcacaagtgtggaacctgagtctcctaagaccagagaagctcctcccttcctgggcctacccaggtttgcctggggcaggaagtcatggccagcttgggggtccaggggtaagtgtcttcatacttggacctgagagggactgagaggcctggcctcgagttatgtggatttgggctggcagccttgtccatgaaggaaaagaggatactcacagagaacatccaggtgactgggtcaatttggctggtactcactacattcttgctttgacattcatagagtcctgtgtcactccgagtagagcaaggaccctgttgtcattggacatctgcagcctggaaatgactgtgagtctatgaccatttacccaccacatgtagattgtgccatgaatctcaggttcacaggttaagaccacagcctcctcatcctccacggggttgctggcaacatagggcttgagcagatttgctgtgcagataacagagaagattcccctgtgtggcaccgttgatttctccatgagcattttccaatcagagttgacatctcccacctctcagccaatccaagtccttaaaagcccacagcaggactgtgtgtcaaaagacagatggatgcatgattatctgagggctcagagaccacggggccacctgctctgtgtgggagatgcacagacttctgaagtgtgactcgagcagcaatattggtgaagtgtgaattgagcagggtcaaacaattagagtttgattaactttgtttaaattgagcagagtccaagtgaggcagcagtggctcatgcatctccccacccgaaggacctcaccttatgacaatgttgttattatgaatacacaggtgtgcaagaaacaggcagtaaatcaggcagcacccacctggccagctccacctggtcctaggaaccaccagtattcccattatgtgtatgttacagctttttaggctacaaaatataaaatacaatcacagaatataaaatatgctattgtcaacacaaaatattgaatatgaagctgaatatgttgttccactttttctcactcttgttaaactttgctgattcagttttggaagtttctattgacacacacttaagctagagattctttcctcagctgtgtgcagcctaccagtaagcccatggagagcattctttatttctcttaaagtgtttttaatctctagtatttcatttgcttctttcttagaatagtcatctctgtttaaatcacccatccattcctgaaaggtgtctcctttttccatcataatccttaaccagagttgttttaaatttccagtctgataatttcagcatccctaccacatctgtgtctggttctgatccttgctctgtctttcaaactgcattttttttttttttgccatagtctgtcttgtatttttttgaaaaccacacatgatgtactgtgtaaaagggacttgagtgagcaggcattcagtgacatggtggtgagtgtggggagggaagtgttctgtggttctggatgaggtctgtgtcctgggctgtgaatgtcacaagtgcctctcaggtttttctttccattaggtgggatatgatgacttgaggctggagttggatatttcccctccccctggccagttaagctcccatcaaaccccagctaattcggctgcagtaaaatagtttctcttaaatgtaggtcttaccaagaagaacataattcactgacaactttccaagtgtttttttcccttcttcctacaagaaggatgtggattctttttgaatattgactgtgagaacctggtagagctccaggagctaagagtcataaaactgtccccctactcccaggactaatccatccactgttgtgtttatctctgcgctgtgtccacactgagcctccagaatttcctcaattagagttcaggttttctgaccccagcactggttcccgctggggtttctgtgcctgtgtttctgctcaggtacggtgcgctgctctgtatttgcctgtgggtctctccaatatgtgggccagttagcactgagatcttgcttcctgagaaatctaaacgagttgttgatttttcagtttgttcagctttttacttgttgttagaactgcgtgaaaatttttaagctacttacatgcctgatggaaattcgaagtctctagggcatgacaggaggatatgagccccacagcaggttgaggagggagtcatgagtgaaatgggtgaaatgagcccgtgggctttggaaactgcagatctgtccttctgcctctgaccccctggtgagtccatgtagaaagtgaaaccaccattgcaaagcatatgatggagagaggaagctagcttggctgcccgcatctcacctctagcctcaaactggctctcttctctgattcctgggcataggccagggtaagcatgggaggaatttatagtttaactttgaagcaaggatgataatagtccctccctaaaattagctcctccttgtcgggggctaccttggtaaatctaagaaaagaccatgaattatgggaggggcccaaattctgctaaaatgcaggcatagtttctataatcccttactgctcaggagtcatgtgtccagaggtcacaagatttgtgactttcctagttgctcctatagatagcaagactactgtagaatctgagatttatcttttgagatgtttctcagacttttgcattctggcaaccagctgacctcatctagactcatgaccaatggctcaaccagtcatgtagtccccactcagaggcagattcaacaaatacataccattttcctacctgcatcatttcatctccagccagtcaacagtacttattccttagacctttgccccttcaaagtttttgaaaaaatctaacctctgagccattggggaagctgatttgagtcatgataaacttctgtcctcctgtttggcagccttgggctaagtaaaactattctttactacacatcaccttcacaataaattggctttgcctgtgcagagggcaagaacctgtcaggtgattgtaagaatggatggaggagtcactgatctctttcaggtggcctgtttcatgagtcagcctctcagagagaaagagccctggtctgggacacagtggaagctcattctcctgttggcccggggacattgcctcattatggatcctggcaggggtggctactctggctgattttggtgcatttttcatttcccagaaggcaggacaggcctcagtgtgagcaggaaggaaatggaaccatcagtcttgttagagaggatgtctggggaagtcctcagggtggaggaagctgtgcaggacagggttcatcaggtagaatgaaagggggatgcacttttttcactgaacacctttcagatgtctcactaactctggcctcactgggctctgcctttccttctgagccctgagccctgagctctgagccctgattcctgggagggagggagggaggaagggtgaagctgggatgtgtgctgtccaggtttcttccatctctggaatcttgaaagcgagggaccctaatgtgttaccacagaggagaccatgggaaaaagctgtttctcaggggtgcctggcttatgaattgaggggaattcagaccaggttggactcgtgaactgcagggaccctgttccatgtcagcaaccagctcctctagctcagtgtttctctctgtggctaattcttttgtgtgatttctgagcccatgctagagtcctcctcacgatgcctgatggtcagacctgtgtggggagacctaatgatggggtgggggtggtcttgtgtgtcacacagagtgtccagggaacacactttgtgactttctctaccccagccccacaacaagatctggatagtgggcttggtcagataaagtcagaatccatgggggagggtatgtgtcctggcagtgctgaggttcgtacctccagcttagttctcagtctctgcaaatacatttatgttgtgcatgtgctgttttctggactgtacttcttgaacctgtctgcagataatgtcatgagagatctgcatggaagtatatgagggctatcagattagggtgggtgtgttttacatagtgggtttttttttcaccaaacacttttcaaaaaattgtggttgagtgtgtatatagaaacacatacatacttatatttgttagatgtgtatatacgtatatgtgtatatatgtgtgtgtgtgtgtgtgtgtgtgtgtgtgtgtgtatatatatatatataaaatgtgccattttaaccgcttcacttaaggggagagagagagagagagaagagagtttctactaataccaaatctgggttaaataagggtggtcctatttcctggggttggccctcttccttaatgggctgtatcttgagcacagtgattcagttgaagaacagagaccaaattaaaagctacattgctaaagaaacaacaggtgctggagaagatgtggagaaataggaacacttttacactgttggtgggattgtaaactagttcaaccattgtggaagtcagtgtggcgattcctcagggatctagaactagaaataccatttgacccagccatcccattactgggtatatagccaaaggattataaatcaagctgctataaagacacttgcacacgtatgtttattgtggcagtattcacaataacaaagacttggaggcaacccaaatgtccaacaatgatagactggattaagaaaatgtggcatatatacaccatggaacacttatgcagccataaaaaatgatgagttcatgtcctttgtagggacatggatgaagctggaaaccattattctcagcaaactatcgcaaggacaaaaaatcaaacaccacatgttctcactcataggtgggagttgaacggtgagaacacatggacacaggaaggggaacattacacaccagggcctgttgtggggtgggaggaggggaaagggatagcattaggagatatacctaatgttaaatgacgggttaatgggtgcagcacaccaacatggcacatgtatacgtatgtaactaacctgcacattgcctgcatgtaccctaaaacttaaagtctaataaaaaataaataaataaaaccccatggtgaatttctattatttttgtgttaccttggcatctttttaatcttccttgaacataccaaattttttcttgaaaaagattaagttctctctctctctctttgctttgagatgtaaatgtgctatgtgttttctctaaaactcagtaaagccttcctcaggtaagcgttaacctttaccatttacaagaaagcaatttgaatccaactatcttttaaaatggtgggttttaccgatctcatgcctaaagccctaaaatcaaaattctaaaatctttttgtctctctctatctttatatgaacatacataagttatatgttttatcacatacatgtatatgtcacacatttatatactgttgacacatagtatcaaattaatgtaaaaataaatgagtactcagaaattaagtgaataagcccaaatgcttttctatacatgcgattttagtaaactttggtgaatatagttttaaaattgttggtaaaataaagtaagaatgtcttcataatttaatttatacgtttttgcctatgtctgttggcaggcaggtttatattgtctttactagatgttttaaggtcagcaaacacttgtttccatatatatacattttcttaatttgtctgtgagcttatgtctttatatttgaagctttaaattctgagttctagataagtgaccatagtaagaactggggacaaaacccatcccatcctccagctgtgccttttagccatgctgggagagatgagattatccaggcattttcttcatagctctgttctttgtcttgggctttgcatctggtacatagttagaacggtttactccctagttttttttctactgaaaataaggctgtttaagtctgtttttacattgctacagacaaatacatgaacccgaataatttataaagaaaaaaggttgaatggtctcatgattcagcaggttgtagagtaagcatgattctgacatctgctcagcttttgaggaggcctcagaaaacttacaatcacggagaaagccaatggtggaggaagacatcttatataatgggagctggaggaagagaacaagggttgcacactggtaaacaaccagataaaactcactgttgctataacagcaccaaggaaaatggtattaaaatatgagaaagcacctccatgatccaatcacatccaaccaggctccacctccaactttggagattacaatttgacatgagatttgggtggggataaaggtgcaaaaaaatattattctccccatcgtccctcccaaatctcatgtctttctcacattgaataatataagaatggcttcccaacagtctctagagtcttaactcattccagcattaactcaaaagtccgaaatagcaagtttcatctgagacaaggcaagttccctttacctatgagcctgtaaattcaaacacaagttagttactttcaagacacaatggaagtataggcattgggtaaatactcccattccaaagggaagaaataggccaaaggaaataggatacaggtcccatgaaagtctgaaaccttgcagcacagtctttaaaacttaaagctccaaaataatctcctttgaccccatatctcatattcagggcacactgatgtaaggcttaggcttccaaggttctgggcatcacaggaacattccaagagagtcacaaaagaatttgtagtgaggcttttgatgctaaagagcatattagaccgagtaagtcactgaagaaaaaaaagtcagaggagaagatgggtgagggtgacagaaatggaatggtgaaaggaaagttctgataaaaatgtttacctgctggacatggtggctcatgcctgtaatcccagcactttgggaggccgaggtgtgcagatcatgaggtcaggagtttgagaccagcctgaccaacatggtgaaaccccatctctactaaaaatacaaaaattagccaggcatggtggcatggacctgtaatcccagctactcaggaggctgaaggcaggagaatcacttgaacttgggatgcggaggttgcagtgagctgaaatcgcagcattgcactccagcctgggtgacacagtgagtctccatcacaaaaagaaaaaaaaactttacccaagggctcatctggtaccttgctctgtgactaatatcttacacattttgatttactcttccactttcattttctgatgcgcaaagggtcacccttctgctgaagatgagaaaagaggctgagggagctcaaatgagtggtctagagtcatccagctacttcatagagcttgtgtgtttcaccttgacatttgtgcacagacagaaaagtgagacaaagaaggaaggcaaagcaagtttttgttgtgggtgacatttatgaaagttacctgtgttggcagaataacggactcctaaaatgtttgcaacctagctctagaacctgtgcatttacttttctttgtaaaaacacggtgcaggggtgataaaattaaaatcgtaagatgtggacgttgttctagattatctgggtgggcccattgtaatcagaagtgtccttgtaagtgacaaagaaaagcaggggcatcagtctgagaatgatgagcctgtgaaactccactggccaatgctgggtgtgagcatgcatcaaaagacaaaattacaactaatgtagttatagattttattttttgtttattatttgaggcagctcttactctacaaatatagtgatagcacttcctgggctatacaataacaaaacagtgggttttgtcaagtgggaactggtaaacaaagccatataaataaataaatcagttaacattagggtacttcaggtcgcttttctgtaaaagttaaagcagaggaaacttttattatgctgtctcaggtagagtggaatctcctgttttcaacaaaaaacaaaggtctgttctggtatctctttgcttcattaaaatttcagttgtagactgtagcatttagcatgagtggttctattttggagtctctaggctctcacttaggtgggagtgtgaccaaaatttaaagcattggcattcatctcagtaaccatcatattgggcttccatcgtttataggtttatgatgtcttcctgatcacacatttctttgagtttttgtcatttcagccaaagagagaccctttggtatttgtagatggctgcacacaaaactttttaaaaacttttgtagaattcaccacaccaaaatgtagaattaaaaaacctgtagaatttatcacaccagagatgctactagtatgactattggaaggataacaccaaaagtttggagtatgcactttaggcaagatgcaaaccaactaaaatagaatagatcaaagaatgagccagaagagtctagcaattttaaccaagtagtatgtttggtaacttctgtgattgagtcattattatactcaatatatttgtttatgtgcaacagttggtgtcagaatctgcacaggctcctccctgttcagctggtagggaacaattttattatgtagcattcgacggctcattaaattaaaacagggaatgagaacaatgagtctgaaaatgtaactttaaaagcgccactgtacatttgaacaaacaattgtgttaaatatgctgctaatgtcagccgttgggtggactaaatgatatcttatgtaaaaatttgagggtgacatgatatatctgtcactctattacgctgctctcagaaactacttcatgtgaaattctgatgataccatcatcctgccaagtgaaagaggcaggcataagcatggacaaattaagaggggtaagagcctgattttgatgtggaaacgtgttctgacaacttgagaaaagcttttcacagtgtgaagttgtcaacttcttatcctggttttcaacttgagtgtctgtagttatggtgtcaaacatattggtgagctctgagtgactcatacttcagatacgagggttttcccgtgaaatttaccttgagctttccacctccagcttataaggcttcaggaacagagcagattttattcttactgattcaataagagaaaactggatgggaggaactagaagaattcagggtctagtccagactaccggtgaaaaataaaaactcaaaaacaataaacagagcagcaatttcatagcaggtatactacactttttattttcaacattattttgctctctataggcatatctatttttaccaaagataaacccagtaggacaaatttgtttacaaagtaggtttagtcttaccaagctttgccaggattctttacataagtgcatcaagagtagcaatggaccacagaggctcttcctaaagtttgcttcgctagaaatttttataagtagtctcagattaaatttttacaaacctctggagacgaggaagccaaatgtaggccatcttcagactttgcctgcagtacatatgtgtccattctatgtatattctcaaatataacttctcagtcaaaccttggtaatataaccaatgttttgaaacgtgtccttttataaagagagaagactcttactaaacttgtgcaaataactgtattagcataaacatatgaatactcatgaatagtttcccaatcctgggacagttaggtaaagagcaaaaataaatgggcttcaattattgcttccaaaagtatactttaccaaattgctttagatatagctagcttaaaagaaggaaaattccataaatctggaaaaaatcatttaaagaatcagcaaattttcaaataaaaattataaaaacattatccactttatcatttatttcaaggaaattatttttgttctgcttggtctaggttggcatatttcatgaaggcatcaacctgtttgttaaagttttggaagtctatagacagttcagtgatataatcttgaactgctcagaaacttgtatgcaagagtacttgtcagcatcttttccataaatcttttgaaatagaagcaattttgaactgtagctgattgcagatgctttcaggaagaatcaaaacaactatctgtgaatgaccatcatgtaaaatgactattgttaaaactctgataaagagcccgcatcgccaagtcaatcctaagccaaaagaacaaagctggaggtatcacactacctgacttcaaactatactacaaggctacagtaaccaaaacagcatggtactggtaccaaaacagagatatagatcaatggaacagaacagagccctcagaaataatgccgcatatctacaactatctgatctttgacaaacctgagaaaaacaagcaatggggaaaggattccctatttaataaatggtgctgggaaaactggctagccatatgtagaaagctgaaactggatcccttccttacaccttatacaaaaatcaattcaagatggattaaagatttaaacgttagacctaaaaccataaaaaccctagaagaaaacctaggcattaccattcaggacataggcgtgggcaaggacttcatgtccaaaacaccaaaagcaatggcaacaaaagccaaaattgacaaatgggatctaattaaactaaagagcttctgcacagcaaaagaaactaccatcagagtgaacaggcaacctacaacatgggagaaaattttcgcaacctactcatctgacaaagggctgatatccagaatctacaatgaactcaaacaaatttacaagaaaaaaacaaacaaccccatcaaaaagtgggcgaaggacatgaacagacacttctcaaaagaagacatttatgcagccaaaaaacacatgaagaaatgctcatcatcactggccatcagagaaatgcaaatcaaaaccactatgagatatcatctcacaccagttagaatggcaatcattaaaaagtcaggaaacaacaggtgctggagaggatgtggagaaataggaacacttttacactgttggtgggactgtaaactagttcaaccactgtggaagtcagtgtggcgattcctcagggatctagaactagaaataccatttgacccagccatcccattactgggtatatacccaaaggactataaatcatgctgctataaagacacatgcacacgtatgtttattgcagcactattcacaatagcaaagacttggaaccaacccaaatgtccaacaatgatagactggattaagaaaatgtggcacatatacaccatggaatactatgcagccataaaaaatgatgagttcatatcctttgtagggacatggatgaaattggaaaccatcattctcagtaaactatcgcaagaacaaaaaaccaaacaccgcatattctcactcataggtgggaattgaacaatgagatcacatggacacaggaaggggaatatcacactctggggactgtggtggggtcgggggaggggggagggatagcattgggagatatacctaatgctagatgacacattagtgggtgcagcgcaccagcatgtcacatgtatacatatgtaactaacctgcacatggtgcacatgtaccctaaaacttagagtataataaaaaaaataaaaataaaaaaaaaaagatgaaaaaaaaaaaaaaaaaaaaaaactctgataagagtttggtataataaagagagtaactccagccagtactccagtcatgatgctggcagtggccccaactgagagaccaaaagaactttcttgtcctgaagcagctgtcatggaaaaaaaaagaggagaaggaataaataataaagacagcaagggttttagccaattattttttgagatagggtctcactctgttgcctaggctggagtgcagtggtgcaatctcagctcactgcaacctgtgcctcccagtctcaagcagtcctcccacctcgctctcctgagtagttgggactataggcacacaccaccacacatgcttaatttttgtattttttgtagagatggggttttaccatgttgttgagggtggttttgaactcctggactcaagttatccacccgccttggcttcccaaagtgcagggattacaggtatgagccaccgctcctcccggtttcatgctttttataataagaatcaactctttatgtaataataaataaataaacagaaattatttgctttagatgtagcatatgtagatttagattgtccagagtcaggagctaagcctcatatttttttttttttgttttagctcagtgtagagtgcattgaaggtgttgtaaaaataattccatatagtaagccaactttaaaccctgctcacagccagatctgccaagtatgagccaggtaaaattaccaaaaacggtggttctgactgactccttaacaataacgtggcttacaaacaaagactgatatgaaatagttgatccaacccaaacactttgctcatttcccaaaattttctatacaaatatatacaacttaccacaacataaagatcataatgaaagatttgccttttattcctttaaatgaccatatgttcagatctgatgtactgacagcaataattctccattaagcagaaaactaataaaatttgaaaaatagtgattttatatttagatgatactcagatcttctgctacatatgtggaaaatggaattattgctagaaacattgtttaaagattagggtatgaaaggagtattaggaagtcaggtggttctttccttaggaagcagcttatctggattcattcaaagagctttaggtgagtttgaggtctttctgcaaaatgtaaattgctatctgagaaaccatatatagtccaatgatgaaagaatgcaaagccttagaagcaccggagacaattccagtatcttccctaaagttctgacaaaaaggaaaataactatcaaattattcaactcgaatgcttattatgtatgtataagtcagtcgtcagatgaagagaggctggaaatatgacttctacccctagggaactcacagtcttgtgggggccactaggggtggtggtgtgacctgcctggagcagggctaagtatggacttgtgagtcaagggctatcaaaacctaagtgaactgatggccgttcagagaaggtagagttccattccacagtttgcaagaaggacaatttcatggaggaggccacgttggactagacctttaaaagttggtagaatttaaaagcaaggatatggaagcaggaagagtgaaagtgagcagaggtacaggagtgaggcaagggtgagcagtgttaattttttaatggtggtattataaaacacacatcaaaatttgccatattattattattattattttggagacagtgtctggctctgttgcccaggctggagtgcagtagctcaatcatggctcactgtagcctccacctcctgggctcaagcaatcctcgtacctcagcctcctgagtagctgggaccacaaacatataccaccacgcccaactaatttttatatttttgggagtgacaagatcttcctatgttgcccaggctggtctcgaactcctggactcaaataatcctcctgccttaaccccaaagtgctgggactacaggtatgagccactgcacctgaccccatcttaaaaatttttaagtgcacagttgagaaatacatttgcattgtgcaaccatcagcgccacccatattcagagagtatttttcatcttgtaacagggaaaattcatatccatgaaacactaactcctcattcttcctcctccccaccccaggtaacaactatttcagtgtctctatgattttgactgctctagggacttacataaatgagatcatacactgtgtatctttttgtgactggcttatttcacttagcataatgtcctcaaggttcatccatgttgtaatatatgtgagaatttttttccttttgaaggctgaataatatttcattgtatggatagaccacattttgtttatccattcatctatccatggacacttgggttgccttcactttttggctactgtaaatagtgctgctataaacatggaggtaccaatatctgttggggtctctgttttcaattattttgagtttatgcccaggagtggaatggccaagtcatgcagtatctctaattttagttttctgaggaaccaccataatgtttttcacagtggctgcaccattttaattcttatgaatagggcacaagggttccaatttttccacagtctcattaacacttattattttctgggatttttgctttgcgtttgagagtagccatttaaattggcataaggtataatttcattgtggtttacattttcatttccttaatgattagtgatattgatcaatattttctatgcttgctggccatttgtatatcttctttggagaaatgtttatgcaggtcatctgcttatttttttaaattgggttgattttttttttttgctgttgtttaggtagagaaagcaatctttggataccagtgatgtttcactaattctgggccattgatttcacaagttgtatgaggtattagtatgtgagtttggtttcaatcatggctgaggttgaatgccttttccaaaattcagtgtgaatttcaccagaagccacaaagggtccaggagcaagaacatggtgtgactgctctgtgctaaagaatttcagcctgatgacagtgagcaggctacacatgagactgacacaagaacaggtggagagggagactttccactggaagaaggtgattctaacatgcagaatcaccttcaaggagcaagtaagcagaaaaatagacaatggcacagtggccaggcaagaagacactaggtccagaatctgaggttcaaatcctggctctgtgagataaaaacatgccttggtttccccatgctactgaaacaccaggggttgggtctaggtcccattgctcactgcacagaaagccaaccactgagacaatgagcattgccagggaagaaggctttatttgggtgctgcagccaaggaggtgggagatcagtcttaaattcatctctccagcccactcaaattggagggtttatatagctgggaagggaggtaactactagcagggaaaacagcaattaaggaggggtaaggaagcaatcatgataaatgaggagtctggtgtctcattgtctgatagtgatgtggtgagtttcagtctcttgcctgaaggtcggtttcctaactcagatgactgacaaatgttaagtttcaagttataagaccggatgggtcaatttctatgtttattcaaaaaccctgtaaatatcagttctatgtggaacttgagctggtttccccccagttatcacagttagggttaaatgatgcaatataagtaaaacaccagcagtttctgacacacacacacagagtgtgtgtcatttttttattacactttttattacacttttcattctgggatacatttgcagaacctgcaggtttgttacataggtatacaagtgccatggtgttttgctgcacccattaacccatcatgtacattaggtatttctcctaatgctgtccctcccctagtcccccacccctcaacaggccccagtgtgtgatgttcccctccctgtgcccatgtgttctcattgttcaactcccacttatgagtgagaacatgcagtgtttggttttctgttcctgtgttagtttgctgagaatgatggtttccagcttcattcatgtccctgcaaaggacatgaactcatccttttttatggctgcattgaattccatggtgtatatgtaccacattttctttattcagtctatcattgataggcatttgggttggttccaagtctttgctattgtgaatagtgctgcaataaacatatgtgtgtgtgtctttatagtagaatgatctataatctttgggtatatacccagtaatgggatcactgggtcaaatgatatttcttgttctagatccttgaggaatcgccacactgtctttcacaatggttgaattaatttacattcccaccaacagtgtaaaagcattcctatttctccacatcatctccagcatctgttgtttcctgaccttttaatgttcaccattctaactagcatgagacggtatgtcattgtggttttcatttgcatttctctaatgaccagtgatgatgagcttttttttgtatgtttgttggtcacaaaaatgtcctattttgagaagtgtctgttcatgtgcttcacccactttttgatgggcttttttttttcttgtaaatttgtttaagtttcttgtagattttggatattagccttttgtcagatggatagattaaaccttgcaagctgaaactcaatgacttatgtaaacttctggagaaatcatagcaacttatatataaacaacctttgtggctgctgatgtgtggactatacaaaaggtacacatgaacactggattcagactgcaattcagagaaatgtgtcagattgccattgcaattggaagatacttcacaaactctggaaaacctagtctatagggttagaacgatgtttgccaaacgaattgctctaattgaagcagcagttgtgtgactttaataaggttccaggattatactgtcccttttttgctgtgacttccctttgcccttttctgatttgtcttcatccccttttccatgcatgacttcttaagaatgagccttcctagtgatgtaggatcagatgaaacttacagtcacaaagtcatgtcttctacaatgctttctctgaaagcttttgaagaattggggggccaggtgtgctggcagaggcctgtaatcccagcactttgagactctaaggcaggaggatcacttgaaaccaggagtttaagaccagcctgagcaagaaagggagaccacgtctctacaaaacataaaataaatcaaattagccaggtgcagttgtgcatgcctatagtctcagatacttgggaggctaaggctggaggaccgcttcagcccaggagttcaaggctgtagtgagtacactccagtctgcgtgagtgagcaaggttgtgtctctaaaagaaaaaaaaaaaaaggaaaggaaaagaacggggtaaacaggaaagccaaagatctcgggcatctccagatgattgtctgaacaaattgttttttcttggcttcaaaacctttcaagatgtatatttctttgtaaaagaaagacatgccaattgtaactttaagtgagcaatcaaaatctaggtcctaaaactgaagtattttaactctcattctgataatatttattttctgaggcaaagaagaaagacaacgttagatcaattgtttctctgcccactccatctcttccaacctgccttctcccctttaatcaaatgtataaatactaagcctcctgaaacgtcttcagagaaaacacaagccacagaggttttttgcaactcatatattcccagggtgcactgtcaggctctggctcaataaaactcaattggtcaagacccttgcctcagtcaatcattctggataaccaccatgagtcctgcaaagcccttcagtaatctattgcctgcttaggtgatgtgtacctagatgagtcagatcttcatgagtccaacactcgtcttccttttctgtctttcccaaccctaccactcagtgctgtgtgctctgatctgaccccagctcccaggttgtttgtattggtctaagaaagcaagaccaggaggggcaggttgagaaggaagtaagaggccaactgccagggaaagtggcaggtagggctgtcattgctcaacgccacacacactgggtccattttgtgaaattttctggattcataatcttttccctgtgtgtctatcaagaatctcaccctcctccaactttcttctcattacactttctgtttctagtgcactcgtttatgtccagagaatggccatgcaaatagttgacaatagaataaaaaatgacgatttgtcagacttagaagctggcctttcttttttccaaaagagattgaggtttctaaaagctggcttttatgcagggctgtgcagttgtgagtgtagttttagggaacaggtgcataagtgaagggtgagacagaaaacaaaattctggctatttgtcaaatcctgaaagtgaatgggacaaaaatcatttttgaaggaggatgtcattcaggagaccttgtaaatcttagagtgtcctcttaccagatgaagtggaggatgaggttgaattatggagttaggtgacagtgggtacatacttctctgcctcagttttttttttaatctgtaaaaatggggattgtggtacttgggattttttggtgaggactgtagtttcctggaaagctctcaggatagtacctggtacatagtgagtgctgcatcagtgtgagctattataattatgggaatagacaaaggtgccaccctggccatccagagtggggaggtattttccagtcagggtccaggcaggccagctgtagatgaagctgattagtggggaagcttaacttccaggagtggaagaatttaggaggagtaaacagaatgcacaacattctgcaaacattcctttacccaacagtaggaatactcagagttggcgtggattccgtggcaatcattatctcctgggaatctaagaatgtgtcctagagtcaaatggctttgatgtaagccaaacccagaaatgggcttcagggctgccttgcacatagcattcattcatcttgaaaaaggaaagcattcatcttgctaaaggaatcccctcttctggcccaggccattatttttgtttttgtactctcctaatttttaaggtgtaaggagaaagaccgaagaataaaataatggagtacatgtatgaaatgacagggtagaattgagactgctacatgtaagttaagagaaattgtgtataaattttgtgtgagcataagaaggatttcttgttgcaaacagacctctccatataaataatacccattgcctttagtggatagcagaccgcatcagaagaacattccaacagagtcatgagacaatgggtagtgtggcttctttaattggcaggttagactgagtaagttactgaagagaaaggagttgaaggagaagatgggtgagggcaagaaaaatgggaaggtgaaaggaaaggactgaaaggaatgtttaccaagggctcatcaggtaccaggctctgtgactaatgtcttacacatgttaatttactcttccactgtcattttctgatgcagtaagagtcagccttatactgcagatgaggaaagaggctgagggaggtcaaatgagtggcccagggtcatccagccacttcatagcagagctagtgtgcttcactgtggtttgtgcagacagaaaagtgagacgtggaaggaaggcaaaacatttttgttgtgggtgatgtttatgaaagtgacccatatgaggcagaataatggcctcttaaaaatgtccacatccaggccgggtgcaggggcacatgcctgtaatcctagcactttgggaggctgatacgggtggatcacaaggtcaggagttcgagaccatcctggccaacatggtgaaaccacatttctactaaaaatgcaaaaattagctgggcgtggcggtgggcaactgtaatgccagctacttgggaggctgaggcaggagaatcatttgaacctgggaggcggagattgcagtgagcccagattgtgccactgcactccagctggggcaacatgagtgaaactgtctcaaaaaaaaaaaaaaaaatccacatcctaactcttggaacacatgcatttacttttcttggcaaaaacactgttcaaaggtgatgaagttgagtatcttgagaaggaaagcttattctgacttatctgggtggctcccagtgtcatcataagggtccttgtaagtgaaagagaaaggcaggagggtcagggtgagaatgatgcagcctgagagactccactggccattacttcctgtgaacatgtgtgataagacaaaattacaactaatttagttattgatgtaattggcttttatttttgatttatgatttggggcagctctccctctacagatgcttcagcatcccaagtagctgggactatattgcgggatctggccagcagcttgcaatgcaacagggctctttctttgttcccaggcagatcggcaggttgagaaataaaagacacacacaagatagtgaaaactgggtccagaggggtcactgccttctggtcctgcgatgctaccaatgcactggatataccagcatttattattaagtttagtgagagtgttggtaggttagtgagggatttaaggtcatttgtaagctgtccacaagggtcgcattccattcccagagctatggacatctgcttttctgggataggaatcttggttatgtgaaacctccctgactgcatgtccattcataggctctctgcaggcggaagcacatcacatgctgttggctcattctggcagcccaacctggcatttgtctttacacaatcctgtatgcaattttgtatttacaataatcaggagcatttcatcttttattccatagcaatagtttcagggggtctccctacatctcccccttttctctgatttcaatgaaccatagcaatcataggttggcactgatcacgattggattgaagaatattttttccaattttacacacgaacagtaaaccaatagcacaaattatacacagaacaaaattaacgatagtggatcctcccaaagattttacctattgaaaggggttgagattagataacccctcagagatactgtctaaaacttcagcactaggtaaagcagataagtgtgcttgagaggcttcaaaaatctgttctttcagcttgtttatgtctaaacttaaattatcttcacttccttgtaaatggcattttactgattcccaattgtgaaaagactctttatattggaacggagttatacaaaaatcagaagtattccaatcacgttgcatttgtaatctgtgttctaaactcataattctatctcccatccatataacagaagcacatcacgcgctgtaggctcattctggcagcccaacctggcattgtctttacacaatcctgcatgcaattttgtatttacaataatcaggagcatttcatcttttattctgtagcaatagtttcagggggtctccctacaggactacaggtgcgcgccaccatgccctgctaatttttgtatttttagtagagacagggtttcaccatattgaccaggctgatctcaaactcctgaccttgtgatctgcctgccttgtcctcccaaaatgctgggattacagatgtgagccacagcgcccagcccataaatcacacatttctttgagtttttgtaattccagcccaagagaaaccatttgatatttgaagaatggctgcacaccaataaaaacatctgtagattgcaccacacgagggagactaccagtatgactatcaggaggaaaatatcaagagtttggaatatgcaccttaggcaagatgcaaaccaactgcaataggatagatcaaggaagaagccagaagagtctagtcattttaaccaggcagcacatttcatgatttttacagctgagtctctataaaacccgatgtatttatccatgtgcaacaagaagggtgagaaactgcacaggctcccccctgttcagctgatagagagcaattctattatctagcattgcatgtgtatgttaaattaaaacagggagtgagaataggcaagtatagaagtggaagcctaaaaaaatctccatacatttgaggaaaaagttgtgttacaggtgcagctaacgtcagcctttgggtggattaaaggatctctcggtatgtaaaaatgggtgggctgggtgtggtggctcacgcctgtaatcgcagcactttgggaggctgaggcgtgcggataacctgaggtcggagttcaagaccagcctgaccaacatggagaaaccctgtctctactgaaaatacaaaattagctgggcgtggtggtgcatgcctgtaatcccagctacttgggaggctgaagcaggagaagcacttgaacccaggaggcagaggttgccgtgagccaggattgtgccgttgcactccagcatgggcaacaagagcgaaactccatcttataaaaaaaaaaaaaagtatggttgacatgatatacctgacactgttaacttactctcagaagctacttcttgtgaaatcctaagtacagcattattctgggaagcaaaggagacaggcataagcaaggacaaattaagagaggtaagagtctcatcatgattgatagtcttgttctgacatcttgagaaaagctgtccacagtgtaaagtcatcaacttgtcgtggtttgcagtttgagtgtctctaagttatggtgttgaacatgtggtgagctcttagtggcccccacctcagacacgagggttttcccatgaaatttacattgagttgtccacctccaccttatatggcttcaggaacagagccactcttgttcttaatgatttcattggagaaaattgaattggaagaactaaaagaattcagggtccagtccagtctaccagtggattataaatactcaaagataatgaacagtggttcaatctggtaacaggtgtactacagtttttcttttcaacatagtttttctctctataggagtctctatttttaccaaagataattccagtaggatgaatttgtttgcaaatttggttgagtctcaccgaacttgcccagattttttacctaagtgcggcaagagtagcaatggactgtagaggccatttttaaactttgctttgctagaagtttttaataagaatctcagattaaacttccaaaaacctcttgagactaggaagccaaaccaaggcccacttcagactttgcctgcattccctatgggtttattctatgtatattctcaaatataacatcccagtcaaagccttgataatataatcaatgttttcaaatgtgtcctgttataaagagagcagattcttactgaacttgtgcaaatagctttattaccataaacatatgaatactcatgaatagattcccaattctggggcactcagatagagagcaaaaggaaatgtttcaatttttgtttacaaaagtatactttaccaattgctcaagaaaaaatgttcataaatctggagaatgaaacattccaagaatcagcacattttcaaatagaaaattatgaaatcattatccttttgattatttagtccaataacattgagtatttttcttctttgtcttgaatttcatgaaggtatcagcctgttcattaaaattttgaaagttcttagtccagtggtatgatcttgaagttatcaggagcttgtattcaagagtccttgtaagagacctttccataaatctccttgaagaaaaagcaattttggactgtaggtgattgtaagtagtttgaggaagaatcaaagcaactgtctgggaatgacagagatttaaactgactatggttaaaaatctaatgagaatttattatggtaaagacacagctcacatagaaatctagttacttctgtggcatatgacactatgataacatatttgattttcagaaatttcatataatttttagaatactcattaaaaaaatttttttttcagatggagtctcactctgtcacccagactggagtgcagtggtgccatctgagttcactgcaagctccgcctccgcggttcatgccattctcctgcctcagcctcctgagtagctgggactacaggtgcctgccaccacacccggctaattttgtttttgcatttttagtagagatggggtttcaccgtgttaaccaggatggtctcgatctcctgacctcgtgatctacccacctcggcctcccaaactcctgggattgcaggcgtgagccatcgcgctcagcctagaatactcatattattaacattcccataaatattatttagagaaggtttagcatcacttatcccttatttgaaaatgctttctataaatttaatatataaaataaggtggcttttccgttcagcttctgtttctcaagaggattactgagttcttggtgtagcccattcataaatagggccaaaaatgtatagtcttatgtatgttgaaaaaggtccttaggtaattccagtacttttagctgaaaatcattgatttagttttaagttctacctattgcaacaggagttctccatccttgttacgtgttagtagtgtcagggaagacttaaaaattaccagtgcctgggtccctctccagacctttgaactggaactaatgggtggggcttgagcatccacttttagaaatgttttccagtgattccaatgtgtagctctatttcccatcagatttctctgatttcttgtggcattcaattttttctattttggtatcatgattattttcaggtctcatttcctgtcttaggctttatgtctcctggggtagggaccttgccttcttcatttctgtatgttttttgaacacatgaactgatcatcaggaaaagatctcaaccacacataggttgtgttctgagtctcaggttcacatgttaatcctaaagtctttgttctccacgaggtcacatgttgcttgtgatgaagggtgtggttaagtctgcagtgcagatggttgaagggatttcactctgtttttagacatagcattggaactaagaattttatgtctatatgggtgaaggggcagggatgtgtaggaagacagttctaattaggatggaggatttatactaggaagtagaggtaaaggaagtgagaagccttagtaaatagaagaaatgtgaacttatcaaataggctagagtagacccctgcagattcttgattaaatcaattaaccagattttagaaaggtaatgaggcaatcatatgcaaggaagatttcaaagtctggagacaagaagtcaagcaatactttgagaagtggttgagctttatgggaatggagagaattacactattgagagatgttaaaaataatgaagagggtttcaccatgtgaaattgtgtttctcatttgaatctgagaaacaaatgagcagaggctggagataattatgtctaaaagacagtggggtacagggagcataaaggccagggagaaagggaactgcaggaattagtgctgagaagcaggagtttagtggaggaaggaggagatgcagtcccagatacaggcaaataagtcttttccctctcccaagcatggcagtcagctctgcaggaaccaggataagagaaaaggccatcatacctgccagtcttcctgaaatacagaaatgacatcacagctgctatgttggattaaggagaggaagaagtcctattcttgtagaagctgtcatggaaagaaaagtaaagaaggaatgaaggtgatgttattttacatgggggagcatcaggaacaagcatgtaacatgaggtactctataattgtttcttcaaggaccacattatttctcttggaatattgatgggagatgattatattcttgcagttttttttccctctcaccatgtgtctcggttggtgatcagtcctctgtcaattctctactgcactcagatattttggaaggctttcagatgtgagaaaggctgattgctattttctatgtcattagaacttgccacattttcaccttttcatggttgcatctttttctcggtgtttctgttgtggcagtcatgaatgagactctgtcaggtctccatggcagggacctgattggcagaaggcccaggtcagtgcatttcaaattcaccacctcttgtgcacagaaagcttctttcctacaggctcccagcaagggtgtgaaagcaagcctagttctccgaggctctctttaactctaatgggtgactggttggaggattcctcatcagccttgcaaaaactcttagaactgcattggtacctaaaacttctttctctttgtttttcataggaatcagctctgcatagtggtctgtgggttctcccatactaccttcatgcctgccccacattccctcacagatgtcttccctgataaattatcttgtatgtctaatcccatcttggatgcatctcagttggtaaatactaacataccaggcttgattctttgcccttagctttttttctttctctcccacaagcagtcagtaaccatgtcctagtgttttatgtgttacctctttttccatatatatatatatggaaaaaggtagatactgttgaggggcacttgctatgtgccaggccctgtgctaaatacttccctgtatctcatttaatccacacaataaccctgtcaggtagacattatttccattttggcaatgaaaagacagaagcttagcgtggtgtaaaaactttcctggtgtcatatggctagtgacagggggatctgagatttcattctaggactatttgacctcaaggttgatgatgatgatagtaatatagtagctgacattggttcctctgtgtgtggcatcttgtttcattgactgcattaaatctttaaaagaatggtatgaagaaagcactgtcattgcaatattcaggtaaggaatcagaggttcagagaagttgagtcttgtgcaagaaatttataactgtaaactcttacattaaaaaagaagaaagatctcagatcaacaacctactttaatacttcaggatatgaaagaagaacaaactaaacccaagcacagtgaatgagggaaataataaggattagagtggacataaataaaatggagaacggaaacagaatagaggaaattactgaaaccaaaagttgattcttcaaaataaaatcaacaaaattgacaaccattaactagattgactaagaaaaaaagagaaaagtttaaaattcctaaaatcagaaatgaaaatggactctgagcatggtgggtcatgttttaatcctagcactttgggaggtcacagcagaaggatttcttgagaccaggtgtttggaccagcataggtaacctggggagacgctgtgtgtacaaaaaaataaaaaaccaattagctgggcatgttgacatgcacctgtagtcctagcatcttgagaggctgaagaaggagaattgcttgagcccaggaggttgaggctgcagtgagccataatcacacaactgtattccatcctgggctggcctacagagtgacagcctgtctctctcttttcaacaaaaaaaaaaaaaagaaagaaagaaagaaagaaagaaaaatgaagcgattactaccaattctaataaaataatgattatgaaagtactataaataattgtatgccaataaattggataacctagatgaaatagacaaactcctagaaacacacaaaaatatgaataaaactataatcactaataagattgaatcaataaaagcatttgatgaaattccatattttttcataagaaaaacattgtaagaatggaaggaaaccacttcaacataaaggcaatatgtgaaaaacccaatggtaacatcatacttaacggagaaagactgaaagctttccctgtatgagcaggaataagacaaggatgcccacttttgacacttttattcaacatagtgttgaaaggtctagtcagaaaaattaggcaagaatttaaaaaaagacattcaaattggaaggaaggagtaaaattatttctgtttatagataacttgaacttatatgtagaaaatcctaaaggtggaacaaacctattagaattaataaataaattcagtaacgttgcacaatagaaaatcagcattcaaacgtcagttgtatttcaatacactaaccatgaacagtctgaagggaaattaggaaaaaaatttcaatttatattaacatcaaaaagaataaaatatttaggaataagtttaaccaaagaggtgaaatgattatacctgaaatctacaaaatatggctgaaagaaatgaaagatgacatcaataaattgaaggacattttgttttcatgaattggaagactcaatattgttaggaggacagtgctacccaaagtgagctgcggattcaatacaattcctatcaatcagaatctcagtgacatttttgcagaaaaacaaaaatctgtcctaaaatttatattgcatctcatgactaaatagacacagagctttgaggaggaagaatgaagctggaggactcacactttctgatttcagcatttactacaaagccccagtaatcaatacagtgtggtactggcataaaggaggacatagaaattaatgaagtataatagcccagaaagaaattcttgcatatatggccaaatgattttcatcgagtgtgccaagatcattcaatggggaagggacagtgttctcaccaaatgatattgggaaagctggatattcaagggcaagaaaactagaacctttacataacaccatgtacaaaaatcaacccataatagatcaaagatctaaatgtaagagcaaaaactgtacaactcttagaagaaaagcttcatgatgctggatttcacaatgatttcctggttgtaacaacaaaagcataggcaacaaataaaacggataaatcggacttcataaaaatcaaaaccttttacatatcgaagaacattatcaagaaagtaaaaaggcaacccatgaaatgataaaaatatttgcaaattatatgtgtgataagaaattaatttccagaatacatgaaaagctacaagtcaacaacagcaaacatccgaaaacccaattaaaaaatgaacaaaagattaaaatggagttttctccaaggaggttacacaaatatccagtaagcccatgcaaagttcctcagcatcatgaatacttagagatgtgcaaatcaaaaccacaatgttacaccacctcacacactttaggatggctttgataaacaacaacaatgacagcaacacaaaacaacaggtgttttcaagcagatggaaaaattggagctctagtgcattgctgatgggaatgggaaatgttatagccactgtaaaaattggtgtgctgtttctcaaaaaattaaacaataaattaccgtttgatccagcaattccacttctggacatactccccatagaattgaaagaaatttgaacaaatatttgtgcactgatgttcagagaagcattactcacactagcgaaaaaatggaaacaaccaaaaagtccattgaaagataagtgggtaggcaaatgaggtgtgtctatacgttgaaatgttattcaaccttaacaaggaataaaattccaatacatcgtgcaaaatggatgaaccttgaagatattatgctaactgaaataagccagacacaaaaggataattattatataattccatttataaaagatagttagaatagccagttacatagagacagaaattagaatggtgggtgctaagggttcgagggagaaggagtgagagttactgtttattgggtacagaggtttaatatggtaagaggaaaaagttctggaaatggatagtgtgatggttacacaacactaaattgcacacttagaaatagctaatggtaagccttatattagatatatataaagtgtctggtagtcttaccctctctataattacacactttttggcactgcccttttcctgccatgcagagctccaggggtgaatctccctatttctctagctctgcatcagtcacagtcctccatgctgtgtcccacgtactgtgcccacagcttcatacaaccgctgacttcagagccaggaccaggcttaggagtctgccctgaggctccttctcttctcatttccctgcagcctggcccgggggaggcttggcttcaactggcagctccatttagcgaaattcaggacagtccacaaggggtctttctccacacatgctggtcccaccccaggtggagtcaaacagggccagtcaccagaggagcccagagcagagcaggaagcagagtctgagctgctcctccctcacccaaggggcttcctcctctcatttgggggaaaagtgtgagcttgtttcaaagcctcagatgttccttgtagctcatggaataggtacaagaaaaaaaagacgtggcagaaggggatgtgttagtgacatccagaagcaacttgatcttgaggacactccttcttgtccctctgtgaagcctcttctaccacatagggctcagggctgataatgacccctccctacctttctcaggcgagacacaaggtcagccatgagaaaacagaaaaacaaggagaagagagtttgtagagacaaattgggagggttcaggaggagaatttgggatttgcttttgcccatgggacacaggctgggaataaaaatgttttcctgactcttctctgaaagccagatagactccacctaaaaccctactgccaaggatgctgggatccacttaccagagactttgactgtcaacgatgtggagctttcctcgccagtggctgagttacgaacagagcaaacatagagcccgctatgctttgtagtaatttgggggataaacagattttgtcctgattgctgaaacttcccattaattgtccaagaatactgtgccggtgggttagagttcgcgaagcaagacaagtagaggttatctcctgaacggtaattggtgtatgaagggtgaattctggggaggtctggaccatctggagcaaagagaataaagccacaggtgatgccatctgagggaaggggatgctcctggtctcttaaagggacacagtgaccctctgagacaagacacatcctcaagtcccagcaaaaccccctctatgttcactgagccgaaccctgaagtattcacctgtttctcccaccacaagatgtgggccccaagtctcccacgacaagaccgtccactccccttatattcttggttaaggctgtgcctacccaggttttcccagggcagggagtcatggccagcttggatgtccagaagtaaagttgtctatacttggaccggagagagactgagaggcctggcccctggtcatttggatttaagctggtggcctggcccacagaggaacaaaagatacagaggacattcagggtgactgggtcactgtggatgccaccatatcggtcccgtatttcacattcatagggtcctgtttcatttctcgtgacactgggtagaatgaggatcctgttttcaatgggtcgctttaccctgggactgaccgggaggctctgaccatttagccaccaaatgtaggtgtagctctcactcttaggttcacaggtgaaggctaatacatccttattctccctggggtttaagttgttgatggtgatttagggcttgggcagcttcgctgtgtggataacagagagaagattgtcctgtgtggcacttttgattcctccacaggcatccttcaatcagagttaccatctcccacctctcagcccacctgagtccttgaaagccaataactggtgtgtgtgtcacaagacagatgcatgatgatctaagggctcaaagactgtgaggccgcctgctctgtcttaggaaagcacagactttctgaagtgtcaattgagcagcagtgttgggtcatggacagacatgtcagtgggagtcacagccccagtacccctcccagtctctccctaatcagttgactggctggctcaccttgggttccttacctggaatgtgcaactgctgggccccttccaaattccatcctactttgcccccctagatgtgatttctctgcagcttccatttccaaggacattctagagatcagtaataatgggacttcccattgtcctgaaaccctgaagatactgagcagcctggcctgggactggatgtttcagcagaaataacacaggggagaccagagtcaagcctggaggtcagttcagtcatcaggcagtggaggcacaaggtggggcagctttttgcaggtgtttcatgatgacttacttgaaccagtgacctctaaagatagaacagagtgcaaggaatgatctagaaagagtgaaggggataggcaagagctggtggctttggagcagaagcatgttccctgtcttgggttctttaagtttcctctccttctgcagagggcaggtgaggaccatgtggatctttccagaaatacatgcggacatttgcaaaagcagaactgactggtggaaagggtgggaatgaactgctggaaatctggtcgtcatggaccatgtgtgtttgatggatatgagacaaatttggagagaagtttttcaaatattttctttcattgaacaatctactctgtgattccctgggttcgactactctagggacctcatgtaagtggattccagagtgaatatgagaagagactgctggttgccaggagctgggagtggggagaatcagaagttgttcatgggtgtgcagtttcagttatgcaaggtagggagtttctagagatctgctgtagagcttgatgcctatagttcacacagattgagtatttcttatgcataagacttaagacaaaaagtgtttcggatttctgacattttttgattctgaaatatttgtcatatacttactggtttagcatcccaaatctgaaagattcaaaatctaaaatgctccagtgagcatttcttttcagcatcagattagtaggcaaaagtgggaggtgataagccaaagatattcttgcccttttttttctctcaccacgtttctggcttggtgattagttttcggtcaattccatactggccatgctgcactcgtttattttttaaggctttgggatgtgagaaaggctgattgctattttctgtgtcatcagaactttccaccttttcatggttgcatctttttcacagtgtttctgttgtggcagtcattaataagagcctgtcaggtcagatttaggacggagttttctaattctgccaaaaatgttactgtgattctgggaggggttgcattgaatctgcaactcactttgggtagtattgtctttctaacaatattgagtcttccaatccatgaaaatgaaatgtctttccatatattgatatcgtctttaatttctttcagcaatgttttgtagttttcaaggtataatcatttgacctttttggttaaacttattccaaaatattttattccttttgatgttaatgtgaattgaatttctttccttaatttcctttcagattgttcattgttagtgtatagtctaaagaatgatctagaaagagtgaggggacaggcaaaagctggtggttttggagcagaaacatattccctgtcctggggttttgattttccctctccctttgcagagggcaggtggctcttccctgatagctagatagacttcactggaaaacatattgccaatgtttcagggatccacttaccagggactatggtcctcttgattatgagatttgttccagcagtggctgagttatggatgaaacagacatagagccctctatatgttttagtgatttgagggataaagaacacttgtgctgattgctggaacttcccatcaatcagccaagaatgctctgccagtgggtgagtgtctgtgaggcaggagagcttggggacttcccttgtatggtaataggtgtgaggaagaaatggtgggggcatccaggccatctggagcaaagagcataaagtcacaggcactattgtcagagggaagggaaaatcctggtctgtggaagggccacagtgaccctgtgagccaagccgcaacactgaactcccagccaaatccccgctgtgttcactgatctggagcctgagacattcacctgtttctcccatcacaagctgtggaccctgagtctcctatgacaggaggagcctcttttctcctattgtggatcaagcctaggcctattctggtttgcctggggcagaaagtcatggccagctttgatgcctaggggtaaaggtctctgtacttggacctgagagggactgagaggcctggcctctggccatgtgtatttgggatggcagtctggcccacagaggaacagaagatactcacggaggagattcagggtgactgggtcactgcggctggcactccctgagttccgtatttcacattcatagggtcctgcagtatactttgtgacaccaaatagaaagagggtcctgttggtttcggacagctgaaacctatgagtcatagggaggctctgaccattcatccaccactggtagcttgtgtccggagtctcaggatcacaggttaagatcacagtttccatggcctccctggggtttaagttgctgctggagatggagggcttgggagtctccactgtgcagaaaacagagagaagattgccctgtgtggcacctttgattcctccaaaggcatttttcaatcagagttggcatttcccacctctcagcccacccaagtccttaaaagcccatggcaggtgtgtgtgttacaagacagatgcatggcaatctgagggctcagtgattgtgaggctgcctgctttatgtgggagaagcacagactttctcaggtgtgtattgagcagcagcattgggtcatggaaagacacaggaccagcagtcacagcccctggtgcctctctgagtccctccatctcgaagtgcctgcctggcccaccttgtggtcctcacttggagcatgcagtgctggaatcttcttagtttcagtcttactttgccccctgaggtatgttttctctgcagcttcccttgccaaggacatccaagagatgaatgatggaacttcccattgtctttaaaccctttgggtactggaaagcctggcctgggactgggtacttcagcataaataacacaggggagaccagagtcaagcctggaggtcagttcagtcatcaggcagtggagccacaaggtggggcagttttcccaggtgtctcatagtgagtgacttgagccagtgacctctaaagatagagcagagtccaaggaatgacctacaaagagtgaaggggacaggcaagagctgatagcttctgaacaagaccatgtgccctgttctgggtccacaatgctcccttccccctgtagagggcaggtgaggacgatgtggacctttctagaaatacatgtggatgtttgcaaatgcgaaactgactggtggaaagggtgaacatgaactgatgatggaagtctggccctcatggaccatatgtgtttggtggatattagaccaatatttgggaagaagtcttgcagatactttcattagatattctactctgtttctgagtttaactaccctatgtacctcatatcagtggattccagagtgaatcagagagtagaatagtagtttccaggagctgggatcaggggaatagggcgttgttctgtgggtgtgcggttccagttatgcaggataaggaggttctagagatctcctgtacagcctcgtgcctatagttcattcagataaagtgctccttatgcagaaagcttaaaacaaagtgttttggatttctaatttttttattttggaatatttgccgtatatgtactggtttagcatcccaaatctgaaaaatttaaaatccacaatgcgccagtgagcacttctttttagcatcacatcagtggtcagaagggttgagttttgagcatttcagattgtggatttctggatttgggatgctcaattcgtaatactgtaattttcccataaaaagttgtcaggagtttagacctcatgttatgttctgactctagtaacaaaaaaaatttggaggaaatattaaaatgttttcataagtggaaatttttactgatgatccaaacatctaagatcaattgctggtagtagtatttctcctgagaccaaaataaggtttaggtgtgccgtgaattccagcaggatcacattatgctcaaagaaagatgccaaaggtgattggaaattagcagctccttaagtagagagagtcccgttaaaaggacagaactggtcagtgcatcaattacataaagggaggaaggatgccaaattaaaagaagtgatgtgtgttatgttagtaaatatagaaagaactccctgcttctaatttctgtgcagagttaggaaaaatggggaggaccccaaaacaggtatgtgaaatgctttcttcattttctcttaagctcaggaaacaccactagagtttaagtttgtgtgaaataggaagattctaagtgagatgccaatggctcatgtgtctccccacaagaagaactccaacttatgaaaacggcatcatcatgaggaaacacttgtgtgtggcacaggcagtaaaaccatcagatagcacccacctggtcacctccaactggtcctcaaaaccaccagtattcctattacgtgtacgttacagcatttgtatttgtcccacaactacataatttaaaaattgctactgtcaaaacaaaatattaaatatgaagttgaatcagttgttccactttttcttccccactcttcttgaactttcctgtttcagttttggaaatttctattgacacgtcctcaagctagggattccttagcttttttacttagtgttggaaccgagtgacaaattccaagcttgttatatgcctgaccggaagccagaagtctctaggaagtgactggagaatgtgagctctatagcaggttgaggatggagtcacgagtgaaatgggtgatatgagcccatgggcttgggggactgcaggcctgtccagcctctgacaccctggtgagtcattgcagagattacaacagtgacagcaaactagcatggctgactccatctggcatctagtctcaggctggctgtcctcacttattcctgggcataggccaggctaaccttgggaggaatttagtttatggtttaattttgaagcaagaatgataatagttcctccataaaactaacacccttactttgcccagggacggcctttgtcaaactagtgaaagaccatgagattaagattataggagggaaccgaattctgctaaattgttgtcacagtttctataatccctgactgctccaatgtcatttggctggagttgacaaaatttgtaactaattgatcctatagataacatcactattatagaagttgagattggtcttttgagatgtttctcattcttttgcattctggcaactggctgacctcatccatacctatgattaatggctcagccagtcatgtggtccctacctagaggcggattccagcacaaactgatcatttccctccgcccgcatgattccatcaccaaacaatcagcagtactcatttttcagtcctgtgcccctgaaactatccttgaaaatctctaagccctgatccactggggaggctgatttgagtaataataaacctctgtcctcctgtttggcagacttggagtcattaaaatctttctttactacaaatcaccatttcaataatttttttgtgtgtgtgtgcaggaggccagaagaacttgtctgacaatgataagagtggttggagggacttcctatccctgtcccatggtcttgtccacaggtcagcctcacaaaggggaagagcccttgatgggaatacagtggaagctcattctcttagtgacctggggacattggctcgagatgaagcctggcaggagtggcaactccaggtgatttctgcacctttcctatttcctgggaggttggctaggccacagtgttagaaggaagggaacagaacagccagcctagttagagggagtgtctggggaaggcctaggtgtgagggaagaagctgtgcaggacagggcttgccagtcagaatgaagtgggaggaagatgagggacacagagaagcagagagaggcagagacaccatggcagtgagcagtgagggctacactgacgtcagagaccccagggaccagctgcccccagttccacagtccagaaccaaggagccctgagaaccctctggtggccaaagagcttcagagttacatgaggtggggttgctttaggggcaagaggtagtggggggatgaaacatgggtgtcagcttctgaaggacaagggacaggtgtggctaggacctcctaggattctgcatccaacatccagtctctaaagaggttttggatcattcatttcttcattccattccttcatttgttatgtgagagctcctgagtgtgtgtgtctctcactgggcctgtgctgatgcagggtgtgagtggggaaagaaaacaaggtcctctccttgatcctctcatgacagtgacatggacactttgggaaacacagggtttcaggttcagtgatgggggttaagatctgagagggaggcctgctcatgttttttgcactgattctgacagttgaggcaggtgatttagttctggagtacagattaatcagctgaccatttgctctcactcctctgaggtttggatgcctaagaagagaggatttgagccaataaatgacatggggtccttgggacccagtaagccctcacttctggtggaggagaggaagggcctgtggctgcaggcagacctcatgtgaccctgatctcccctttgtgttggtgtgactctggttcagtgactgtgccttcctgtgcctcagttttctctcaatcaaataagctaaatggcaaatggactgtggcttttcatgctatctgtgaataaatgttaaagtattcacagtcacttgatctaatgcttggcacagtggaggtttcacacaaacagcatttattattaatttgcttccatgagaaagcaccgttacatcagatccctgtggacaagctgctaccaggtacatcttctgtcttctgtttctgcttctggggacattagacttcctatggactctcctaagcctcctaaggcagttggctgatggtcttcaaagattgtctttctgtcctctccactctgcctctcctgttttgacctctgtcctctacaccattgcccagatgaggctctgagggctgagccctagctggtgaacagctccaggagacacagtcctcagacagctggtaaatccttggtcccagtaagccctgcccatgaagccacaacccagccctggcacaggctcctaagctttatctggagcaaggatttagggacagggtttggaggttgaggtttctagggctgagcttctctgagagtatctcaggggacccctcaggccaagccctgctcagttctccagggtctttctcagggtcaaatttatgaagagggcatgaggtgcttggctgagactgatctcctcctgctgagtccccccatcagactgtccttcctctgcagcgagtgtctgcagggtctggatgcgggaaaggaattctgatctgttgaaatgtgtctcctctgtgtgtgtcctgcactaaatgcccaaaccccagcatgggacataatgcagagagggacacaggcacagtctaggcctgacaatcctgtgtgtgtgaagtagaaatgacccctgtcccccaacacccagggatcatgtggaatcacttacggtataaggtgaaggtgaaatatccagttactcctctagtcccatcacctcgctttatgatgtgtaaggtgtaggatcctgcgtcctcccgggtgacattctggatcagcagggatgcattggaatatgctgtttctcgtccactatatgcaggcccatatataattatttgaccgtctactacatatgatgtaatgtaatggtagaggtccctgatttgccctttgtaccagatgtagccagtaagattctggggcaaattgtggacaagtagaagaacatccttcccctcggaaacttttggtggctgggcttcaatcgtgacttgggcagtggtgggcaggttccagaagtttaaaagtgatgctaggaggtggagagagcatcagacaatattgagacctatgtattggggtgaaaagatggggccctgggtcctgaggaggtctcttcaatcctcagccttgaagacacacacacacacacacacacacacacacacacacacacacacacacaaaaggggcatgtgtgtttgtatgtgtgtatgtgtgtgtgtactactgtcctactaggtcaaggtcagcagcatgacccccattccttcaccacttgtgaccttggcatttttctgtttggaatcctcttccccaggggtccgcatgaccccatcaggtcctgctcacatcagggtatcctaagacttctttcctgacacctccttcagagaccctgggtcttccctttctgacctttccctgctctgctccctaaagggttcttgttaacagctgacctcacattctagatctctttgtatgtctgtcttcctccccatgacagcatgagctcagtgaggacagggacttttgtgatcttggttgcaccccagtgcctggaacaggctgcagactcctgtagatgtgagacttctcagggccctccacacccttggtgtttttttttttctcccccaattgttgaggttttttgctgaggacagtgtttcacgtcctgcttatatttttatttgaagtgtcatctgatatagttattattatcatttttcaaaatgtggcccctgatgattaatcaggaaaacagaacacttaagattttcctacctcttaccaattccagttcaatgtgattttcctgttttgacccctgtccctctctggtatattttcccctatccaggctccaacagagccttctttccttttatttctttcttctctcttttttttttttttttttttttttttttttttttttgagacggagtctcgtactgtcgcccaggctggtatgcagtggcgctatctcggcacgctgcaacttctgcctcctgggttcacgtgattctcctgccacagcctcctgagtagctggaattacaggaacacacgacaatacctggttaattttttgtatttttagtagagacagggctacactgtgttggccagactgaccttgaactcctgatctcgtgatccacccacctcagcctccctaagtgctggcttctttcattttttagaaccccatcctctccaggagaccccatccagtcactcttcttcctcctcctgtcctctcccaggaagttctctcctcacctgtgaccaggagccccttccatttgatgtgctctgtgcagggaggggctgagaggggccccatggtctctgctgcctgtgtgttctcctctgtggagatgagcctaggatccagaaacttcctgagcacggctgtcagctgtgctgtccttcctccttctgcactgagcctcttcctggggcagcagcaattcccaggctcatgggtggggtcaggcccaggacacctctctgtcccctcctctctcagtcctgcctccttgtccctccttctgttttccttttgtctgtgtttcaggtccctggggattgtggaggcctctgcctttttcagcagtgattctttcaccaaacctcaacacacactttgtgcagacacacacacacacacacacacacacacacacaaaagagacacacaccgacccacacagtgacacacataccctgcaggttgggcaaggacagtcctgggcctcagcctcctgctgtccccatggccctgggtcggggtacacattcacgacctttgccctctttcatccccatctggctctccccttcagtgcaggaggctggagctgcaccaggtccctgtcacagtgatgtcccattgtgctgtgggtgagctgtgtgttgcctggtgagagggacccttcctttctctaatcgtgtctagcttggctgcagcttccaagaatggacattcaggacctgggtgtcctagaggaaactgtcctttctggaggtgtgcagggtgaatctctcatgcctcttggtaggagaggcctgtgctggttgctcagtgggggctgtgagtcccgtagtcaaggggaagttctcggtcactctctgactccctggggtttggctgctgagctggtgctcagggtttctcatgttcttcctgaccatctttgatgtcctctcttctctgcccagctgattgtcctgtggtcaccacaccttccccgtggtggtgcaggaggaagtggggagttacccaggaaccccgcgggacatggcttgttgagacgcaggagggggaacctgggacagagcaggggttcagagctggagagattcatcccgacttactccgtggccatgatgggctcagccctccatgtgctgacatacccaggggtctgtcctgagggttttgacctggccaagctgctgtgtgtagaggaggaacaggcagtggccagagatcctgtctggagggacattgctcacacctgagagggcaggtgggggtgagttgtgttctgggagcaaagagcaataacacccctcatctccccgcaaggacacaagagaggtctgtcttcccaagggacagctgggggcaggtggccccatcccggatggtacctgtgtgtgaccatcacatgcgctctgagccccgcgcggtgcagcgggcagggaggtcacagggtgcctggctgattcccggggaggctgtgggccctcaggcagccgctgttctgtgtcagctctaggcttggcctgggatgccccagagaacaggacagatggagcaggggtgggcatttagggagcagtgacagaaagagttgatgaggatggagggaggtcaggaggggaaagctcccagtgtagtgtcgcgtgcaccagcgctgccctgggagatgcctttagctgggcccagggaaggagcaggtgtgtggggcaggagctccctgcagagggagtggtgttaggttggcggcagccaaggcagggaggagctgacagagtccgtgtggggagcatggagggcgctgaggacttaggcccaagtgaccctggtgagggtggacactgctgggctgtgggttccgctgagggaggttggcatcccctgggaaggctccaggctgggagggactctgtcgccctcttgtggacagggagggaagtgtgaacggcagcaatcccaggccaggctgcatgttttattccatgtggatctgcacacttcacacgaggtcacacatatgttatgttacagctccttcaccttccagccccgtgagtcccagtctgtgtgactctacgttcactgttctccctctttcacaatcagatgtccgaaacgcagatttttgtcaccttctgtgagtttgtgtttgtgtgcagtaggcggcactgtgtataccctgggggcagtgatgtctggggctgagcactggacatgggcttgggagcagaagagggagcagcagggtgggaagatcaatgttgaggggcagggacaagtcattttcattttctcactcccagggaccagaacccaggattctgactccagggcacagtatcacacccttctggtgtccctggatgtcgtgatgctcatagcgtcatgttgccttggcattcattttttaaggtgtaagtttatttgcctcaaatcagaggcagggcttggtcaccatggcagttttcaatactgtatctggttcaggtggctccagttggtgtccagagataaaatcttagaggcatctctcctgcttggtgtgctgggctcacctctctccagctgctttctttaaactgataattctgacattcgccctcacatttaaagtgaccacctctcagtcacagcctgagctcctggtcccagtgtttgctgcttgctttgaacacatccattaaagctccctgctggaaacctgtcagataacaccctggacttaataaagccattggctcaccggtctctttcctccctgcctgtgctcactgacctctgtggtctccaggtgtgctgagtgctccctagtgtgtgtaagtattaaaaatacttacattttcacattgtggttgtatcattgtagcctcacatgccatccagggcctgacattgaggctgccctatgggacctgtgctggttgagcccctgctggagctcttgttttggggcctctggttctgctggggacaggagcttccaactaacttgattgaaaatctgatgcgtttcattgaaacactgggtcagatgatgtattcatgggcttcagctgccataacaaacaccttagcctgggtgaattaaataatagaaatctgtttttcacagttctgtgaataatatgctattttaaccactttaaaatccacaatcaagtgaaattaaccacatacacagtgttaaattaccatcaccagtatttttcctagaaaatttttatcattttaaactgaagctttgtatcttttaaacaataactccctgtatgttccaccctagactttgatcatctctactctgtctctatgaatttgcctattcttggtgtttcacataaatggaattatacaattatgttattttgtttctgacacatttcagttagcataatgtttccaaagtccatgcatgttccagcgggtgtcagaccttcattcctctttatggcagattaacattctgttgtgtgtgtcaccatatttatttattcatgtgttgatgagcacttggattgttttcatattttatctcttgaataatgctgcaatcaacattcctatgcaagtgcctgtttgagtccctggatttaattccttgggtgtacacctaggaataaatgttgggccaaatgagaattctatgattagctttttgaggaaaagcaaaactctttctcctaggggctgtactttttatattctcaccagcaatgtatgaggattccaaattctacataatgctgctacttgttatttaacattttaaaagaatggtagccagtttcgtaggtgtgatgtggtgtctcattgcagctttgactttgtattttcctagtgactaatgatgttgagtatcctttcatgtccttcttgatgtggtttgcaaatattttctctcattctgtgtctattaattattttcttgataagtttctttgatgtacaaaaggctcacatcttgataaagcccaatttatctttttttcttgtttctcatgcttttgtatcatatctaagaatccattgcacatttgaggtcatcaatatttacctctatgtctattttaagatgtttttatggttataagtctgatatttaactcagtgattaattttttagagaattgtttgatatggtggaagctagagtaatctaaattcactgttttgcatgtggttatctagttgtttctgcactatcatttgaaaggagagttgttcatccattaaattgtcttgacaccctcttcaaagagtaattgaccataagtgtgagggtttatttctagactgtcaattctatcccatttttctttatgtccattcttttgccagcagcttctgttttaataattgtactcctttgtgagatttcaaataagaaagttcaagtcctacaatttattttggcaagattgttttggctattcaggtgtccatttttgaaagatggggaagctaatgtttcacaattgggaaagtcttttctgtcttcttcagggggaaatttgggagaacattttaagaaactttatctaagtaggtaaactctcaccactttatttgctgaagtgctatgttaaagtgtgcattgcctattgtggaagaattgtgagaccctggaagcacctgcccacgtggtgagagacagtaaattccatgatgaggggcagagaggacattgttttgtgatacaatgttgttgggggagttgtatacatctcaacttctttatgtctctatacagtgggtgtagggaccagccccacagggtcagtgggtttttctccccgtgtgcagagacgagaaattgtagaaataaagaaacaagacaaagagataaaagaaaagacaactgggcctgggggacaactaccaccaagatgcggagaccagtagtggccccgaatgccaggcttcgctgatatttattggatataagacaaaggggcaggataaggagtgtgagccatctccaatgataggtaaggccacatgtgtcacgtgtccactggagaaggggcccttccctgcctggcagccaaggcagagagagagaggagaaagagagagcttacaccattatttctgcttattagagacttttagtactttcactagtttgctactgctaactaaacagcagagccaggtgtacaggatggaacatgaaggcagactaggagtgtgaccactgaagcacagcatcacagggagacggtcaggcctccagataactgcgggtggacctgactcatgtcaggccctccacaagaggtggaggagtggagtcttctctaaactcccccaggaaaagggagactccctttcccggtctgctaagtagcgggtgtttttccttgacactgaggctaccactagaccacggtctgcttggcaatgggcatctttccagacgctggcgttaccgctagaccaaggagccctctagtggccctgtctgggcataacagaaggctcgcactcctgtcttctggtcacttctcactatgtctccccagctcctatctctgtatggcctggcttttcctaggttatgattatagaccaaggattattataatattggaataaagagcaattgctaccaactaatgattaatgatatttatatataatcatatctaagatctatatctggtataactattcttcttttacattttattatactggaacggctcgttccctcagtctcttgcctcggcacctgggtggcttgccgcccacaagtgggcatctccattggacacagtaggttttgaaatccttgtttatcctctggggtctgggtcttatcttacctgttagctgcagctgaaagaggtgtctgctaaggcaatgacacctgtggggagaagaagggttcagcagagtgaaagtagctgggactcagagaagccaggaaagtctgactcttagaaactatgggtcagcagatgtgtgtcctcaggggtaaatgggccatgccggtagccactgcagtggactggaagaaggtaagggctgctgggtatcccatgttctgtctcagctctgcagctgaagatttgggccctgggctggtacggccctgcagcaggggaagggtatacaggaatggctgcatatcgggaccaagtccatgtcatcttcttaggcattgttactgcagatggaggattctgttcagagacctggcctggacacatgggagggcccaccccattcttttaaaattattttaagagaacagtattagcaaatgtggtacatgtcttattctgctagaatcagtattactgtcatgttttaccatgtatctcttaggaaatggtgagagccatccacacaatgtggatttaaaggggactctactataatttcagctttcctactctttatagaaaccatcttctctgcaaacacacaggcaatatctctgtgttcatttctactgggaaccctgtatgcaagatggagagagccacatttccccctgagatgttatgtaaaatttgaggttgagatgacatatctgacactctgttgttaccctcagaagctactacatgtgaaattctaatgactgcattatcctaccaagttaaagaggcaggcatgagcaaggacatttaagaggggtgagagcctcatcatgatggggagtcttgttctgacatcttgggaagaaatgtccacagtgtgaagtcatcaacttgttgtcctggtttacagtttgagcatctgttgttatggtgtcgaaaatgttggcgagttctgagtggctcacgcttcaggtacaagggttttcccatgaaatttacattgagttgtccacctccagcttatagggcttctggaacagagtgggtcttgctctttgtgattccatgggagaaagtggaattggaggaactagtagaattcagggaactgtccagtctacaggtggataataaaaacacagaaacaatgaacagagctgcaatctcataaccggtgtactacagtttttattttccacataatttttctctctatgggcatctctagttttaccaatgataatttcagtagaataagtttgtttgcaaaataggttgagtttcttcaaacgtggtctgattgtttacataagtgcagcaagagtatcaatggaccatgtagggtctcttttaaaattttctttgctgtaagtttttataaggaatctcagattaaacatttacaaacctcttgcgaataggaagccaaagcaaggctgacttcagactttgcctacagttcatattggttcattctatctatattcttaaatataaaattccagtcaaagctttggtaatataaccaatgatttcaaatgtgtcgtgttaaaaagagagcagatttttactatacttgtgcaaatatgtgtattaccataaacatatcaatactcctgaatagttgcccaattctggggcagtcaggtagacagcaaaagtaaatgcttcaattattgttcccagaagtatagtttattgaactgctataagctatagatagattaaaagaaaacaattccataaatctagaaaacaaaccatttaaagaatcagcaaattttcaaataaaagtcataaaaacattatcctcattattatcaattgtttcaatgaaatcaatgtttttcctgcttggtaggctgagaattttatgaagatatcagcctgtttgttaaagttttggaagtttttgacagtccagtggtataatgtgaaagttatgagaaacttgtattaaagagttcttgtcagcatcgtttccataaatctccttgaaaaggaagcaattttggactgtagctgattggaaatgctttgaggaagaataaaaacaacatctgtgaatgacaaagattttaaatgactatggttaaaactctgatgagaattcattatgataacacagctcacataaaaagttagttatttctgtggtatatgacattaatggctgataacatatttaatttctaggaatctcatacaatttctggaacaatcatatcagtaacatatccataaatataacatagagaaggtttagcatcctttaccacttatgatttgaaaatgcttttcatataattttacaggtcaaataaagtggcttttccatgtagcttgtgtttctcaacaggattactgagttcttggtggaggtcattaatggatagggccaagaaagtataggcttatgtatgctgaaaaatttccctagataattccaatactcccagctaataatcatgaatttaggtgtcagttttcctattagaacagctgttctttatcctggttacacattagtgacatctgggaagacttaaaaattaccaatgcctgagtctcactttagaccattaaattggatcctatgggtggggcttgggcatccatttaaaaaaatgttttccagtgattccaatgtgtagctgtatttcccctcagatttctctgatttcttgtggcattcacttttttctattttggtattataattattttttgggtcttatcgtctatcttaggctttatgttccttggggtagaaaccttgccttcttcatttctgtatctttcatgaacatatgagttggtcatcaggaaaatgttttcaatcacatgtaggttgtgttctgagtctcaggtttacacattaatgctagagtcattgttctccaggaggtcagaggttgcttgtgatgaagggtatgggtaagcccataatgcagacggtagatgggagatcaccctgtttttagccatagcattggaactaagcattctatgtgtatatcagctggaggggaagggatgtgtagaaagacatatttaattagaatggaggaattatactaggaaatagagggaatggaagcaataaaaattagtaaagagaagaaatgtgaacttatcagataggcaagagtagatccctgaagatttttgaataggggagttaactagaatttaggaaggtaatgaggcagtcatacacaaggaagatttcaaagactggagataagtcaagcagtacctctagcagttgttgaagttgtgggaatggagagaatgacacaagtgagagatgttaaaaaaaatgatcaagagcgttttataaggtattgaatctgggaaacaaatgagcagaggctgaggataatcatttgtaggagacagtggggtacagggagcatgaagaacaggggagaagagacctgcaggaataagtgctgagaagcaggagtttagtgagaggaggaggaggtccagtcccaaatactggcaaagaagttctttccctctcccaagcatgacagtcagccctgcaggaaacagaacaaaaggaaaggccatcatacctgccagtcttcctgaaataaactacaccagggctgctagatcagagccacactggccagtacttcaatcatgatgctgacagtggctctacctgaaaggccaggacaacttccttgtactgaaatatctgtcatggaaagaaaagaagagaaggaataaaggtgatgttattttacagtgtggtaccttatgaaccatcactaagtatgaagttgtttctatttgtcccttcggggattacattaattttgtgggagggttgctggtagatgattagccaactatattcttgcagttttttaatctgtcaacatgtttctaggttagtgatcagtcttctgtcaatttcatcctgaccatgcggcactcagatatttttgaaggctttatgatgtgagaaaggctgactgctattttctgtgtcgttagaactttctaccctttcatggttgcatctttttctcagtgtgtcagttgtggtaggcatgaataagactctgtcaggtctccatggcagcttgtgtttctcaagaggattacagagttcttgatggaacacattaatgaataggactgagaaagtataggcttatgtatgttgaaaaatttccctaggtaattccagcactcccagctaataatcgattaattaataatcaattgacttgattgacagaaggcccaaatcagtgcctgccaaactgataacctactttacatagagtcctcactttcctgaagctcccagcagggatatgaaagcaagcccagttctatgagcctctgttttattctcctgggtgactggggggaagactccccatcagtcttgccatgctttctttgaactctagctaaattttctttctctttctccttcacaggaaccagatttgcatggtggtcccaaagctcaacagacttttttcatgcctgccccacttttcctcacaggcacttttcctaataaattatcctgcatgtccaatctcatcttggatgcatctcagtgggcataaactaacataccaggcttgatttttttgcacttagcttttttctgtctctcccacatgtagccagtaaccatgtcttagtgttttatctgttacctcttttttcatgtgtatagaaaaaaatatatatttccatatacttatttatatgtaatatatatgataaaatatgtaatataaaatgtatagtaatgtaaaacatatacatattttccatatatgtatatggaaaaagaggtaacacataaaacaccaggacatttacatataataaaattgacatatgttatatatatatatgtagtgtctggtagtcttaacgtttctataaatacacaatttttgtcactgccccttccttctttcccatgcagagctcccatggccaaatctccctatttctccaagtgtgtgtcactcactgtcctctgtgctgtggcccatgtgctgtgtccacagcctcctagtgttttatgtgttctctttttctatatatatggaaaaagcatatacatatttctctctatagatttatatacaatatataataatctaaaaatatagaatatgtaacaatttaaaatatgtacatatttccatatctatgaaaaaaggtaacacataaacactaggccatttatatatataaaatccacatatgtaatataaatgccaattttatcatatataaataagtatatacacgatagacttatcatatatatataaggtgaatttggaatgccctgacctgggccctctgtcagtcaagtccctgccatggaggtcattcatggctgccacaactgagacaccaatagaaagatgcagctatgaaaaggtgaaaagttctaaagttgtagcaaatagcaatcagcctttctcacatcccaaaaccttcaaaaatatctgagtgcagcatatccaagatggaattaaaaacttcaatcttgaaaaggaaaaaggaaactggaggactcacactttcaatttcagcatctactgcaaagctacagtaatcaatacagtgtggtactggcataaacgaggacatagtaactaatggcatagaatagagaacccagaaagaaagcttgcatatatgggcaaatgatttttgtcaagagtgccaagaccattccatggggaaaggacagtctttttaacaagtgatactgggaaagttggctatccatggacaattatgaaatgaacctttacctcacaccatatacaaaaaaatgaacccacagtggatcaaagacctaaatggaagagtgaaggctaccagactctcagaagaaaacataaggaaaaagcttcatgttattgaatttcagaatgatttattagttataactacaaaagcacaggcaacaaaaagataaattggacttcatgaaaattaaaacttttatatatcaaaggccattatcaagaatgtataaaggcaaactatgacatagggaaagtttctgcaaatcatatatctgataagggattaatttccagaatacatgaagaacactacaaatcaaaaacagcaaaaacacaaaagcccaattaaaaatggagaaaagactaaaatagagattttattaaacaagatatacaaatggccaatgaggacatgaaaggattctcaatatgactaatgtttagagatacgcaaaccaaaaccacagcgatacacgacctcacacacattaggatggctttgataaaaacaacatgaacaataacatcacaaaacaagtgttttcaagtacgaagaaacattgaagctctttgtgtattgctgatgggaatgggaaatgttatagccactgtggaaaaagtggcatggcatggccagctcatgcctgtaatcccagcactttgggagccgagatgggtggatctcttgaggtcaggagtttgagaacagcccggcatgcgtggtgaaaccctatctctactaaaagtacaaaaattagctgggtatggtggcatgcgcctgtagtcccagctactcaggaggctgaggcacgagaatcacttgaacctgggacgtggagattgcagtgagccaagattgcaccattgcactccagtctgggtgacagagcaagaccgtgtctcaacatcaacaacagaaaagaaaacagtatgtcagattcttaaaaaaattaaagcattaccacttgaaccagcaattctacttctggacatacagccaaaagtattgaaaaatatttgaacagatattcgtacactgatgttcacagcagcatcactcacaatagccaatgggtggaaacaaccgaaaagtctattgaaagataagtggatgaacaaaaatgtatatccatactttggaatgttcttcagtcttagcaagggataaaattttgacacatggtgcaaaatggatgaaccttgaagacattatgtgaggggaaataagccagatataaaagcataattattatatacttccatttatgtaagatagttagaatagtcagttacatagagacagaaattagaatggtgattaccaggggttaaggggagaaggaatgagagttatcatttattgggttcagaggtttagtatagtgggataaaagctctggaaatggatagtgttgttagtaacacaacactaaattgcacgcttagaaacagttaacggtaaatcttacatatatagtgtctggtactcttaccctctctataagtacacactttttgtcgctgttccttccctgccatagggagcttctgtgagttaatctccctatttctccaagtgtgcatcactcactgtcctctgtgctgtgttccaggagctgtgtccacaaactcagacaggcagtgacttcagagccaggacacagccctattcccattttttaaagccttacccatgggaggcttggcttctactggccgctcgatttagccagattcagaacaggccacccaggcaccttatccacatgccctagtcccagcccgggtggagtcagggcagggtcggtcactgggcgagcccacagcaatgcagggagcagagtctgagctgcttctccctcaccaaggggcttcctcctctcatttgggaaaagtatgggcttgttttgaagactgatgttcatcgcagctcatggagtacacacacacagacacagacacacacaaaggagacaggagggatgttttggtgacagaaacagcttgaccatgacgaccctcctctttctccctctgtgaaggcccttacactgcatagggcttcgggctgataaagccatttccctacatttctcaggctggactcaaggtcatccaccagaaatctggaaaacaaagggaagagaatctgtagatatgaattgggagtgttcagaagaaaaatttgagatttattttgtgcatgggacacaggctgagaataaaaatgtcttcctggctctttcttggaaagccagataggcttcacctgaaagcatattgccaatgctccagcgatccacttaccagggactgtgattttcttggttgtgaagtttttgccattagtgactgggttatggacataacacagatagtccccactattctctgtagtgacttgggggataaagagctcttgtcctgtttgctggttattcccattcagcagccaagaatactctgctgatggattagagcccatgaggcaggagaggttgaggtttgaccctggatagtaataggtgtctgaaggataagttgtgggttcatctgggccatctggagcaaagagaataaagccacaggtaatgttatcagagggaatgggaagctcctggtctgtgaaagggacacagtgttcctttttgccaagtcacaaccccgaagtcccagccaaacttcctctgtgttcactgaactggaggagtctaagatattcacctgtttctcccatcacaagctgtggaagctgagtctcctaagaccggagaagcccctgccttcctgggcctacttaggtttgcctgggacaggaagtcatggccagcttgggggtccaggggtaagtgtcttcatacttggacctgagagggacagagaggtctggcctagggttatgtggatttgggccggcagccttgtccatgaaggaaaagaggatactcacagagaacatccaggtgactgggtcactgtggcttgtactcactacattcttcctttgacattcatagagtcctgtgtcactccttgtgacactgagtagagcaaggatcctgttatcattggacatctttagcctgggactgagtgtgagtttatgacaatttacccaacacatgtagattgtgccatgagtctcaggttcacaggttaagaccacagcctcctcatcctccgaggggttgctggtgacatagggcttgagcagattcgctgtgcagataacagagaagattcccctgtgtggcacccttgatttctccatgagcattttccaatcagagttgacatctcccacctctcagccaatccaagtccttaaaagcccacagcaggtctgtgtgtcaaaagtcagatggatgcatgatgatctgagggctcagaggccatggggccacctgctctgtgtgggagatgcacagacttctgaagtgtggatcgagcagcaatattggtgaactctgaattgagcagggtcaaacaattagagtttgattaactttgtttaaattgagaagagtccaagtgaggcagcagtggctcacgcatctccccacccgaaggaccccaccttatgacaatgttgttattatgaatacacaggtgtgcatgaaacaggcagtaaatcagacagcacccacctggccagctccacctagtcctaggaaccatcagtattcccattatatgtatgttacagctttttaggctacaaaatataaaatacgactacagaatataaaatatgctattgttaatacaaaatattgaatatgaagctgaatatgttgttccactttttctcactcttgttaaactttgctgtttcaattttggaagtttctattattacacacttaaactagagattctttcctcagctgtgtgcagcctacgagtaagcccatggagggcattctttatttcccttaaagtgtttttaatctctagtatttcttttgcttctttcttagaatagccatctctgtttaaatcacccatctattcctgaaaggtgtctcctttttccatcataatccttaaccagagttgttttaaatttccagtctgataatttcagcatccctaccacatctgtgtctggttctgatccttgctctgtctttcaaactgcatttttttttttgccatagtctgtcttgtatttttttgaaaaccacacatgatgtactgtgtaaaagggacttgagtgagcaggcattcagtgacatggtggtgagtgtggggagggaagggttctgtgattctggatgtggtctgtgtcctgggctgtgaatgtcacaagtgcctctcaggtttttgtttccactaggtggaatatgataacttgaggaggctggagttggttatttcccctccccctggccagttaagctcccatcaaaccccagctaattaggctgcagtaaaatagtttctcttaaatgtaggtcttaccaagaagaacataattcactgacaaccttccaagtgtttttttttcccttcttcctacaagaaggaggtggattctttttggatattgactgtgagaaactggtagactccaggagctaagagtcataaatctgtccccctactcccaagactaatccatccactggtgtgtttatctctgtgctgtgtccacactgagcctccagaatttcctgaattacagttcaggttttctgaccccagcactggtgcccactggggtttctgtgcctgtgtttctgctgaggtatggtgcatgctctgtatttgcctgtgggtctctccaatatgtgggccagttagcactgagaccttgcttccagagaaatctaaacgagttgttgatttttcagtttgttcagctttttacttcttgttagaactgagtgaaaatttttaagctacttacatacctgatggaaattcgaagtctctagggcatgactggaggatatcagccccacagcaggttgaggatggagtcatgagtgaaatgggtgaaatgagcccatgggctttggaaactgcagatctgtccttctgcctctgaccccctggtgagtccatgtagaaagagaaaccaccattgcaaagcatatgatggtgagaggaagctagcttggctgcccgcatctcacctctagtctcaaactggctctcttctctgattcctgggcataggccagggtaagcatgggaggaatttatagtttaactttaaagcaaggatgataatagtccctccctaaaatcagctcctccttgtcggggactaccttggtaaatctaagaaaagaccacaaattatgggaggggcccaaattctgctaaaatgcaggcatagtttctataatctcttactgctcaggagtcatgtgtccagaggtcacaagatttgtgactttcctagttgctcctatagatagcaagactactgtagaatctgagatttatcttttgagatgtttctcagacttttgcattctggcaaccagctgacctcatctagactcatgaccaatggctcaaccagtcatgtggcccccactcagaggcagattcaacaaatacataccattttcctacctgcatcattttatctccagccagtcaacagtacttattccttagaccttcgcccctcaaagtttttgaaaaactctaacctcagagccactggggaaggtgatttgagtcataataaatttctgtcctcctgtttggcagccttgggctaagtaaaactattctttactacacatcaccttcacaataaattggctttgcctgtgcagagggcaagaacctgtcaggtgattataagaatggatggagcagtcactgatctctttctggtggtctgtttcatgagtcagcctctcagagggaaagagccctggactgggacacagtggaagctcattctcctggtgacccggggacattgcctcattacggatcctggcaagggtggctactctggctgattttggtgcatttttcatttcccagaaggcaggacaggcctcagtgtgagcaggaaggaaatggaaccatcaatcttgttagagagggtgtctggggaagtcctcagggtggaggaagctggacaggacagggctcatcaggtagaattaaagggggatgcacttttttcactgaacacctttcagatatctcactaactctggcctcactgggctctgcctttccttctgagccctgagccctgagccctgattcctggagggagggagagagagaggaagggtgaagctgggatgtgtgctgtccaggtttcttccatctctggaatcttgaaagcgagggaccctagtgtgttaccacagaggagaccatgggaaaaagctgtttctcaggggtgcctggcttatgaattgaggggaattcagaccaggttggacttgtgaactgcagggaccctgttccatgtcagcaaccagctcctctagctcagtgtttctctctgtggctaattcttttgtgtgatttctgagcccatgctagagtcctcctcacgatgcctgatggtcagacctgtgtggggagacctaatgatggggtgggggtggtcttgagtgtcacacagagtgtccagggaacaggctttgtgactttctctaccccagccccacaacaagatctggatagtgggcttggtcagataaagtcagaatccatggagggagggtatgtgtcctggcagtactgaggttcctgcctccaggttagttctcagtctctgcaaatacatttatgttgtgcttgtgctgtctcctggactgtttcatgtccttaaactcttgaacctgtctgcagataatgtcatgagaggtctgcatggaagtgtatgagggctatcagattagggtgggggtgttttacatagtgggttttttttttcaccaaacacgtttcaaaaaattgtggttgagtgtgtatatagaaacacatacatacttatattcattagatgtgaatttatgtttatataaatttaatatatagatacatatgtctataagtatacacgcatatgtatatgtgtatatatatgtatatatgtatatatgtatatgtgtgtatatatatgtgtgtgtctgtgtgtatatatatatacatatatatatatatatacacacacatatatatatatataatgtgccattttaactacttcacttaaggggagagagagagagagagagaagagagtttccactaataccaaatctgggttaaataagggtggtcctatttcctggggttgggcttttgctagatgtgtcagttcctgttggaagtgagctagagaggttatatgcttaacaaatgtagagattttctatatgaaaataatctgtgagcacattgataagttttatcctttcctaggtgaaaagcttggtgaaggattttaaggacttcccattggctgaaggctggcaaatggagtttgccatcctctgactacagccattctgaggactggaaaggataccctgagaagtggcctattttatttctgctggaaggtactgaggtttaatttatcttatggagtcttcctagattagaaggctttgagttgtgttgatgccttgccagtgacttagctgcctgatcagtgaacctatttcctttgtctacttcatctgttccctttttgatgttccctataatgtatcactgctatttctcatggaagaaaactgaggataataagatgttaattttttggtggtattttataggaaatccattagtggtaagaaaatgccttttattttaaatggcagcatgagcatgaagaactaaaaaagcatacttggaatcaatgtaaatgttagctacctttctcttgcttaatttaagtacccttgtaagaactatttgtttagctgattgagcacctgcacctgaagagagatgttatttagagtgactactgcttatcctgccttatatatttcttgctttaccagctgtttgctagctaagcgctccctctagaggaaagtaattttgccacattaagtggaggtgtaaaccgttttttcctagggttaatttggagacttttctgactagtggagctattgtgacagtggtttggaagcaggtgtaaacaataggtcctcctaattgtaaagtacaggttgagaaaaatattgtatttgaatttttaatgagacaccccttatggttgtgctatgggaagagaggaggcctggataagaaaggagaaaagagagagactggatctagtgtttagaaggacgtctactttctttcctataatttccagaatcacctgtgtctcctgtgctgtaatggcagtttcagctgctggagccaggggtttgagccccaggacccatcagtcctgctggacaactgtgagactgcttctgaacccagtgacctccatctctgggagcagttgcatctccagtggtctccaccacaggctggacagggtcaaggtggcttcctcttgctctttggacactccttcctaaaatgccctggcctgccataccgagagcaactagtggatacacctctgggatcctggactttgcaactctgcaaagcagctactagaggctttgtccttctcttgagctttctctctttcttctgggccttctcctggtccctattataaaagactgaagtggctaccctcagaaggttttccaaggtgctatctgctactatagcttgcatttgtaggttccttctaatattgggagatttctatataataaacttatcttttagaatgggctgtcacttgactgaatcaggagataaaaaggtgtgtgctaatagtgcccttctcaacctatccataaaggctgcaggattctcatctggcttttagtctatcctagacagtttagagaaattaagaggtctagccttagtttttcttttccattgatctgcagagctattggggtttcaatcagggttgtcaagaggtactgcttcacttcttatttggaatggtgtttctgctatttcttcactttccatatctccttccttcccttttggtgtattataggagatatgttgctcatctccaaaattctctgctgcttgcagagctgcctatttttcagctacagttagggtttggtttaggagcagcataacatccttccatgtgaggtgaaacacctgacttaaattctggaaagcttctatatacctatcaggattgtctgaaaatcagcctaagtcttactttatttgcctaaggtcctgtaatgagaagggaacttggaaggatcccaaattatggagtttcttctcagatggttcccttggaatttgcttttctaattcgaggggattattctttataggcctgcctgatatggctgttaaaaaaatctgggttgctgttacaatgcttgtaaaggtttagtaaaaatgtcctgtcattgtgcaaaatagaatgagttgcttttctcttcaaagtcctgaggttaaaagagttctagtgcctcagagtgcactccagaggggtgcaagctgaagatgctctgttagccatctagaaaaagaagtgaaaataaaagtgtccttatagtcctcctcctttcattgtgacccagagtggagtggaagacagtgggagcatccccccaactgttttctctccttggctcctgagtcctggcactgtgtaaaatgtgccgcccatggttctaggtgtggccttctaagccatggaactggataaatgaagtgatgggattagccacactttacccatgtaaccttagcttatctgcctgtgatctgcctggcttcctgaaaaatggatctctggagaaactgtagcagttgcctttgagcaagctttctttaacagatggaatgtgccagtttccggttatggcccgtgctaaaacattttccctcagaaaagtggtcctggttaactctgttcttaaaatgcccttactaattaaatcgtgttctaattggagatagaataagtaccttaaatgaacatagggacctaatggcagtttttcctgctgatgggacagtatcagaactaaaatttggctacggaagacattttactcctaactgttgaaagcagagcttccccattcacagaaagggcttttctatcagtgcaaaaagagagaattttaaaagtgcagtgttatggcagaggaccaaaaatgtgcctcatgaggaggatttctgcttccactaggtgacactgttggcttagaaataccatgtgcttaccaaaggaaggagagagagagagaggaagggacctattgggttagttattatagcatttaccgatctttcctaacagaactgttccctgaactgtaaaaatttgcacatattgcatacacagaaagaataggagacatagagaccatggatagaaaggaagaacaaatttgcaacaggatagcaaattaggagacccattactaacatctggatgagctgctggaggctgtgttcaatccagaagcttttgaataacatcagggtgtgtcctggccagaaattctcagctgctccaggacatcccccagcctcatgtgatggtgaggttctccatgaaaggaaactagtttgaagagaaccttgaaattaaaggagagatttgaggtttgctccatactcaccattctgatgtttctatcttctgatcacaatcccggataagaactcccaaataaaatggctctgtttgggaatctatccatggttctttgtcacacactagaaagaattcaggacatggaaacacataaagagtgggtttaggagtgaaaaatttaacagataaaaaagaagagagagagaaaaagctttttcatactgagaaagcagtcacctaagagagggtctccaatttggggtggaatgcaattgattttatacagagacttgaggaggcactgattgatttacatagggtccagggggttgttttgaccaggtgtgctgtttacatagcccgagaaaagactggtcctcccacagtaatcttttattatgcaaatgtgacttctacctggtggtcaccatgacacctgcacttgtggtgacaaggaaaaaagaacagaaaccgccatattgggagtacctggctcttagttgcctgcatctatatatgcatatctgtgcttgcagcctgatcattcagtattttttctgttagaaatggcttgggggctgctttttattaaaggaaaattccaccaagaattcttttaccctttctagctgcctaaaaataatttctcaataactcctgtattaggacccctttaggaaaacagaaaagatgacacagactctcctgtaggggattaaccatagttttcttttctcatggaatcccaagagttgcaagtgaatagatttctctcaggtctaaaactctgttcttctctccgttgtgttacctgacctctttgccttttacattactttgtactgtaaaaatatttgacttgtgtgtgtaatgattgccaggtcagtggtaagagctatggttttgaaggtgactaacagtggttataataaattattctagcttcagagggctactcatttctttgcatgtttagatacaaaagacacagtttaaacaattaaggaaatgcctttgtagcaaggtactctgtgggagtgttgcacagtatggtcctcattgcattttcctcttcttggggacctgggattcagtgaaatccttgatttttaatgtctaaatgttgtcccttccaactggttctcttttttacatatttaaatgattagaatctaaaaattgcatagacattgttgtccctcttccttaatgggctctatcttgagcacagtgattcagttgaagaacagagaccaaattaaaagctacatcttttaagaaacaacaggtgctggagaggatgtggagaaataggaacacttttacagtgttgatgggactgtaaactagttcaaccattgtggaagtcagtgtggcaattcttcagggatccagaactagaaatgccatttgatgcagccatcccattactgggtatatacccaaaggattataaatcatgctgctataaagacacattcacacgtatgtttattgtggcactattcacaatagcaaagacctggagccaacccaaatgtccaataatgatagactggattaagaaaatgtggcacatatacaccatggaacactatgcagccataaaaaatgttgagttcatgtcctttgcagggacatggatgaagctggaaaccatcattctcagcaaactatcgcaaggacaaaaaatcaaacaccacatgctctcactcataggtgggagttgaacactgagaacacatggacacaggaaggggaacatcacacaccagggcctgttgtggggtgggaagatgggggagggatagcattaggagatatatctaatgttaaatgatgagttaatgggtgcagcacaccaacatggcacatgtatacatatataactaacctgcccgttgtgcacatgtaccctaaaacttaaagtctaataaaaaataaataaataaaaccccatggtgaatttctattatttttgtgttaccttggcatctttttaatcttccttgaacacaccaaattttttcctgaaagagcttaagttctctctttctctctttgctttgagatgtaaatgtgctatgtattttctctgaaactcagtaaagccttcctcagataaatgttaacctttaccatttacaagaaagcaatttgaatccaactttcctttaaaatggtgggttttaccgatctcatgcctaaagccctaaaatcaaaattctaaaatctttttgtctctctctatctttatgtgaacatatatatgttatatgttttataacatacatgtttatgtcacacatttatatactgttgacacatagtttcaaattaatgtaaaaataaatgagtactcacaaattaagtgaataagcccaaatgcttttctatacatgtgattttaataacctttggtgaatatagttttaaaattgttggtaaaataaagaagaaatgtcttcgtaatttaatttatacgtttttgcctatgtctgttggcaggcaggcttatattgtctttactaggtgttttaaggtcatcaaacagttgcttccatatatatacattttcttaatttgtctgtgagcttatgtctttatatttgaagctttaaattctgagttctagatgagtgaccacagtaagaactggggacaaaacccatcccatcctccagctgtgccttttagccatgctgggagagatgagattatccaggcattttcttcatagctctgttctttgtcttgggctttgcttgtggtacatagttagaatgatttactccctagttttttttctactgagaataaggctgtatgagtctgtttttacattgctacagacaaatacatgaacctgaataatttataaagaaaaaagtttgaatggtctcatgattcagcaggttgtagagtaagcatgattctggcatctgctcaactttcgaggaggcctcagaaaacttacaatcacggagaaagccaatggtggaggaagacatctaatataatgggaactggaggaagacagcaagtgttgcacactggtaaacaaccagataaaaactcactgttgccataacagcaccaaggagaatggtgttaaaatatgagaaaccacgtccatgatccaatcacatccaaccaggctccacctccaactttggagattacaatttgacatgagatttgggtgggggtaaaggtccaaaaaaatattattctccacgtcatccctcccaaatctcatgtctttctcacattgaataatataagaatggcttcccaaccatctctagagtcttaactcattccagcattaactcaaaagtctgaaatagcaagtttcatctgagacaaggcaagttccttttacctatgagcctgtaaattcaaaaacaagttagttactttcaagacacaatggaggtataggcattgggtaaatactcccattccaaagggaagaaataggctgaaggaaataggatacaggccccatgaaagtctgaaaccttgcagcacagtctttaaaacttaaagctccaaaataatctcctttgaccccatatctcatattcagggcacactgatgtaaggcttaggcttccaaggttctgggcatcacaggaatattccaagagagtcacaaaagaatttgtagtgtggcttttgatgctaaacagtgtattagactgagtaagtcactgaagagaaaaaagtcagaggagaagatgagtgagggtgacagaaatggaatggtgaaaggaaaggtctgataaaaatgtttatcggctgggcatggtggctcacgcctgtaatcccagcactttgggaggctgcagtgggtggatcacgaggtcaggagtttgagaccatcctgaccaacaaggtgaaaccccatctctactaaaaatacaaaaattagccaggcatggtggcatgcacctgtaatcccagctactcaggaggctgaaggcaggagaatcacttgaacttgggatgcggaggttgcagtgagctgagatcgcgacattgcactctagcctgggtgacagaatgagactccatctcaaaaaaaaaaacaaaagtttacccaggggctcatctggtaccttgctctgtgactaatatcttacacattttgatttactcttccactttcattttctgatgcgtgaagggtcacccttctgctgaagatgagaaaagaggctgagggagctcaaatgagtggtctagagtcatccagctacttcacagagcttgtgtgtttcaccttgacgttgtgcacagacagaaaagtgagacacagaaggaaggcaaagcaagtttttgttgtgggtgacatttatgaaagttacctgtgttggcagaataacggactcctaaaatgtttgcaccctagctctagaacctgtgcatttacttttcttggtaaaaacacagtgcaggggtgataaaattaaaatcttaagatgtggacgttattctagattatctgggtgggcccattgtaatcagaagtgtccttgtaagtgacaaagaaaagcaggggcatcagtctgagaatgatgagcctgtgaaactccactggccaatgctgagtgtgagcatgcatcaaaagacaaaattacaactaatgtagttatagattttattttttgtttattatttgaggcagctcttactctacaaatatggtgacagccctccctgagctatacaataacaaaacagtgggttttgtcaagtgggaaccagtaaacaaagccatataaataaataaattggtgaacattagggtacttcaggtctcttttctgtaaaagttaaagcagaggaaacttttattatgctatctcaggtagagtggaatctcctgttttcaaccaaaaacaaaggtctgttctggtatctctttgcttcattaaaatttcagttgtagactgtagcatttagcatgagtggttctattttggagtctctaggctctcacttaggtgagtgtgaccaaaatttaaagcattggcattcatctcagtaaccatcatattgggcttccatcatttataggtttatgatgtcttcctgatcacacatttctttgagtttttgtcatttcagccaaagagagaccctttggtatttgttgatggctgcacacaaaactttctaaaaacttttgtagaattcaccacaccaaaatgtagaatttaaaaacctatagaatttatcacaccagagaggctactaatatgactattaggagggtaacaccaaaagtttggagtatgcactttaggcaagatgcaaaccaagcaaaatagaatagatcaaagaatgagccagaagagtctagcaattttaaccaagtagtatgtttggtaacttctgtgattgagtcattattatactcgatacatttgtttatgtgtaacaatcagtgtcagaaactgcacaggctcctccctgttcagctggtagggaacaactttattatgtagcattcgatggctcattaaattaaaacagggagtgaaaacaagtgagtctgaaaatgtaactttaaaagggccactgtacatttgaacaaacaattgtgttaaagatgctgctaatgtcagccattgggtggactaaatgatatcttctgtaaaactttgagggtgacgtgatatatctgtcactctgttacgctactctcagaagctacttcacgtgagattctaatgataccatcatcctgccaagtgaaagaggcaggcataagcatggacaaattaagaggggtaagagcctgattttgatgtgaagacttgttctggcaacttaggaaaagcttttcacagtgtgaagttgtcaacttcttatcctggttttaagtttgagtgtctgtagttatggtgtcaaacatattggtgagctccgagtgactcatacttcaggcacgagggttttcctgtgaaatttacattgagctttccacctccagcttataggacttcagtaacagagcagattttgttcttactgattcaataagaaaaaactggatgggaggaactagaagaattcagggtctagtccagtctaccggtgaataataaaaactcaaaaacaatgaacagagctgcagtttcatagcaggtatactacactttttatttgcaacattatttttctctctataggcatatctatttttaccaaagataaacccagtaggacaaatttgtttacaaagtaggtttagtcttatgaaactttgccgggattctttacataggtgcatcaagagtagcaatggacgacagaggctcttcctgaagtttgcttcgctagaagtttttataaggagtctcagattaaacttttacaaacctctcaaaggccatcttcagactttgcctgcagtacttatgggtccattctatgtatattctcaaatataacatctcagtcaaaggcttggtaatataaccaatgttttgaaacgtgcccttttgtaaagagagaagattcttactaaacttgtgcaaataactgtattagcataaacatatgaatactcatgaatagtttcccaatcctgggacagttaggtaaagagcaaaaataaatggacttcaattattgtttccaaaagtatactttaccaaattgctttagatatagatagcttaaaagaagaaaaattccataaatctggaaaaaatcatttaaagaatcagcaaattttcaaataaaaattataaaaacattatccacgttatcatttatttcaatgaaattatttttgttctgcttggtctaggttggcatatttcatgaaggcatcaaccagtctgttaaagctttgaaagtctatagacagtccagtgatataatcttgaactgctcagaaacttgtatgcaagagtacttgtcagtatcttttccataaatcttttgaaatagaagcaattttggactgtagctgattgcaactgctttcaggaagaatcaaaacaactatctgtgaatgaccatcatgtaaaatgactattgctaaaactctgataagagtttgatataataaagagagtaactccagccagtacaccagtcatgatgctgacattggccccaactgagagatgaaaagaactttcttgtcctgaaacagctgtcatggaaaaaaaaagaagagaaggaataaacaataaagacagcaagggttttaaccaattattttttgagatagggtctcactctgttgcctaggctggagtgcagtggtgcaatctcagctcactgcaacctgtgcctcccaggctcaagccgtcctcccaccttgctctcctgagtagctgggactagacgcacacaccaccatgcatgcttgatttttgtatttttgtagagatgggcttttaccatgttgttgaggctggttttgaattcctggactcaagttatccacccaccttggcgtcccaaggtgcaggcattacaggtgtgagccactgctcctgccggtttcatcctttttataataagaatgaactccttatgtaataataaataaataaacagaaattatttgctttggatgtagcaaatgtagatttagattgtccagagtcaggagctaagcctcattttttttttttgttttagctcagtgtagagtgcattgaagttgtcctaaaaataattccatatagtaagccaactttaaaccctgctcacagccagatctgccaagagtgagccacgtaaaattaccaaaaagggtggttctgactgactccttaacaataacgtggcttacaaacaaagactgatatgaaatagttgatccaacccaaacactttgctcatttcccaaaattttctatacaaacatatacaacttaccacaacgtaaagatcataatgaaaggtttgccttttattcgtttaaatgaccatatgtttagatctgatgtactgacagtgataattctccattaaacagaaacctaataaaatttgaaaaatagtgatttcatatttagatgatactcagatcttctgctacgtatgtggaaaatggaattattgctagaaacattgtttaaagattagggtatgaaagaagtattaggaagtcaggaggttctttctttaggaagcagcttatctggattcattcaaagagctttaggccagtttgaggtctttctgcaaaatgtaaattgctatctgagaaaccatatatagtccaatgatgaaagaatgcaaagccttagaagcaccggagacaattccagtatcttccctaaagttctgacaaaaaggaaaataactatcaaattattcaactcgaatgcttattatgtatgtataagtcagtcggcagatgaagagaggagggaaatatgacttctacccttagggaacacatagtcttgtgggggccactaggggtggtggtgtgacctgcctggagcagcgctaaatatggacttgtgagtcaagggctatcaaaacctaagtaaactgatggccgttcagagaaggtagagttccattccacagtttgcaagaaggactatttcatggaggaggtcatgttggactagacctttaaaagttggtagaatttaaagggaaggatatggaagcaggaagagtgacaatgagcagaggtacaggagtgaggcaagggtgagcaattttaattttttaatagtggtattataaaatgcacatcaaaatttgccatattattattattattattttggagacagtgtctggctctgttgcccaggctggaatgcagtagctcaatcatggcttactgtagcctccacctcctgggctcaagcaatcctcatacctcagcctcctgagtagctgggaccacaagcatataacaccacgcccagctaatttttatatttttgggagtgacaagatcttcctatgttgcccaggctggtctcaaactcctggactcaaatgatcctcctgccttagccccaaagtgctgggactacaggtatgagccactgcacctgaccccatcttaaaaatttctaagtgcacagttcagaaatacatttgcattgtgcaaccatcagcgccacccatcttcagagagtatttttcatcttgtaacagggaaaattcatatccatgaaacactaactcctcatttttcctcctccccaccccaggtaaccactattccagtgtctctatgattgtgactgctctagggacttctataaatgagatcatacactgtgtatctttttgtgactggcttatttcacttagcataatgtcctcaaggttcattcatgttgtaacatatgtgagaatttttttccttttgaaggctgaataatatttcattgtatggatagaccactttttgtttatccattcatctatctatggacacttaggttgccttcactttttggctattgtaaatagtgctgctataaacatggaggtaccaatatctgtttcggtctctgctttcaattatttttgctttatacccaggagtggaatggccaagtcatacagtccctctagttttagttttctgaggaaccaccataatgtttttcacagtggctgcaccattttaattcttatgaatagtgcacaggggttccaatttttccacagtctcattaacacttattattttctggggtttttgctttgtgtttgagagtagccatttaaattcgcataaggtataatttcattgtggtttacattttcatttccttaatgattagtgatattgatcaatattttctatgcttgctggccatttgtatatcttctttggagaaatgtttattcaggtcgtctgcctattttgttaaatcgggttgattttttttgctgttgtttaggtagagaaagcaatctttgaataccagtgatgtttcactaatgctgggccactgatttcacaagaagttgtatgaggtattggaatgtgtgtttggtttcaatcatggctgaggttaaatgccttttccaaaattcagtgtgaatttcaccagaagccacaaaggatccaggagcaagaacatggtgtgactgctctgtgctaaagaatttcagcctgatgacagtgagcaggctacacatgagactaacacaagaacaggtggagagggagactttccactggaagaaggtgattctaacatgcagaatcaccttcaaggagcaagtaagcagaaaaatagacaatggcacagtggccaggcaagaagacactaggtccagaatctgaggttcaaatcctggctctgtgagataaaaacatgccttggtttccccatgctactgaaacaccaggggttgggtctaggtcccattgctcactgcacagaaagccaaccactgagacaatgaacattgccagggaagaaggctttatttgggtgctgcagccaaggaggtgggagatcagtcttaaattcatctctccagcccactcaaattggagggtttatatagctgggaagggaggtaactacctgcagggaaaacagcaattaaggaggggtaaggaagcaatcatgataaatgaagagtctggtgtctcattctctgatggtgatgtggtgaatttcagtctcttgcctgaaggtccgtttcctaactcagatgactgacaaatgttaagtttcaagttttaagaccggatgggtcaatttctatgtttattcaaaaaccctgtaaatatcagttctatgtggaacttgagctggtttgcccccagttatcacagttagtgttaaatgatgcaatataagtaaaacaccagcagtttctgacacacacacagagtgcatgacacaagtggtgtgttgggacaatatagctcagtgaactccctttgtctactcagttatattgagcaatgaggcatctctgaagatgccactttgctacttctcccctgataatttcaccagatccagccatatgagcactgcaagtggggacttagcttaaatcattcctcatatttcccatgcaggtaaatcatttggcaccaaaacaggcacagaagtccaagtcctgctgccagctccacgactgatggcacagagagacttcaggattagtcctttaatctctgtcctctattaaatgaaggtcatcatgctgctgcctaatgtaaaaggattgtggggattttcatcattcattaatgattatcttattctttgaaaccccaagaaaactatataaattccaaagtctaataggtacacaagggctttattatggatgattaagtttcaaaggatgctaacccaaaaaatttttttttcttttttgagacagagtcttgctctgttgcccaggctggagtgcagtggtgcgatcttggctcactgcaagctccacctcctgggttcacaccattctcctgtctcagcctctggagtagctgagactacaggcacccaccaccacgcccggctaatttttttgtatttttagtagagatggggtttcaccatgttagccatgttagccaggatggtctcaatctcctgaccttgtgatccacctgcctcagcctcccaaagtgctgggattacaggcatgaaccaccgcacccagccaaaaaaaattttttaatgcactctcttttccatataatcccaaagtcggtgaatcacctctaagtcaggtgtttatcttagctgatactgccttagtgttggcacaacttaaatttagttcaaataatatttgcatgatctttgcacaacacataaatgcccaggaacaggtggtgctcctcggtggtcaacaccaggattgctatggcagggcagattctttctctatagcccaggtcactggcattcaaagaaatatttttcaatctctgatttttctctggaagtaggaaaatgcttccctaactgctttacttgtaaggatgtttcttgctaattctgtgcccagagtaactaatggggacatagacatagacatcattcaaatggcattctctctttatgataacccatgctttaaaatgaaataaaccaaacccatgccttaagacaacagtcaagaaatacattctgcctaaggaaaagtcctgtgtttgaaggttgttgtccaaataatctgacgttgtggtcatgaaacattgaaaatagcatttggagcagtaagtataaaaaatttagaaggactaaaactacttgaatgcttgttgggaggtttacaatgtagtcaaacaccagttaagcaaaaataaaatttactacttaactgtttacattttctaatgtgtggtttcatggaattgttgagatagaagtagacactgaaataggagtacttgaaagtaataagacagagatttttataaagttatttctgacctaattaagaaaaatataatctctatcacatatgaaataaacaactttagaaaaatgcaatgtcaaagaaaacacttggaatggccaacaaatatctactacagatagaaatgaaaatatttatgttatgtaaatgttgggcatcaaattgtctccgaagttgccttctagagaactttgtttagttggtgtattcttcctatgaatcaaaggaatacagtcttatgataataagtaatgagggataggagacaattttaaggattttaggaaagtagggaagcagtgaagtgaagggtaggcagatacttcggagggtaaaaagtgtttttgattcaaaagaaaagctaaggtagtttgaagaaaacatgcatcatctactagttaatctggggtacaatgaaggtggtgttattttagcagtgttcagaaaagaccagttaattctgtggccatacagaacgaatggaaagattgcaaaaaacagattctgaggaatacaaatcaatctagcaaggaactttatgatgaaggaccaatgtaagcatagaatgcactgtattttttattattattattagcagcatcattggtatggtgatgttacctacttttggagtggagctagatatgagagagctgcatgtcccttgaactttatttggggtaaatagtgaaaacaatatctatgatgagttaatgggtgcagcacaccaacatggcacatgtatacatatgtaacaaacctgcgtgttgtgctcatgtaccctagaacttaaagtataataaaaaaagaaagaaaactatatctaaataaaaaagaaaacattccagaggtgcagaattcaagctagaagaattgtgtccttggatgtcccaaggtcaaattttaatatgtcattgaatgaaggttccaatgtttggaataatgaaaaaagtcatattgaattttgtctttgctgtcctccctccccagtgtctaccaaagaggctgagtaaatattcatgcaagtcaatacactgtcacagccacaattcatcctagcaatctttcctggaatagtcacttaagacgtatctggtgaggacccattggcacttttagagcaatcagaaaatacctcaaattgctcacatctagtgtaggagaaggctaatccatccctgtttcatgaagcatcacttcaatatcctgggacagtcattctacccaaatcttctctccctagagcccaacactctctgcatcttcatccattcttcacggggcttgatttccaagactctctaccatcttggccacacaccatgttacacattcactatggacactgcaccactgcggatgctgcaccaagggttctgaatccaagggcagattgttatgaacagcccctttaaaagtcttaaacgtgatacactggtctgtcagcagatgtgcagagcctcttatgggagacgcaatatttgactcatgtgattcaatgtccataagtcttcatccgaaagatgcccatagagacaaagagcagagtaaagtccttgcagcagtgtttctcaaacttagccacccaccagaactgcctggggaactttgaaagatacccatgctgaatcccacccaccaagattctgatgtaatgctatggggtgagatctggacatcaggatgtttggaatccccccaggctcatttaacatgcaaccaagagtgaagcccactgtcctcagcaatgtgcccagcccggccttcctggcatccccccatgggtacaggatgacagtttctcactctgaccctttcctttattcaatacagcacagcacaatccaacagggtgagcactgttatgacagagaacctcgagtcatatctgattaaatgtcttcaacaaaaccagtgacaatccttggccattcaactatcaattactactttcaacccaggttctaaaggctcttcattagaaacatctcgggttgataatgactggggcaaatgtgccctttggatttgattgctaccatgattattaattaaccgaattgtagagatatcgagtacatttctccctcttgtttgtaagaacccatgagagacaaggccaattgcagacaatgaggacgtcctcataatagtgagatgaactgcctaggtatcttccgatatccttacttccctccagttttgttgcttgcaaaacaacagaatcttctctccatgaaatcatggttatcagttaggaagtagcccacttggttctggatttcgtttagagatttaagatagtaacagagggtgcaggatgacaaacagaatttgtacactgtgtctggtagtggaaaatacccaacagtgtactgtatgctgactctgtcatttcctgccttctctcctcctttcctccctcccttgctccctccctctctccctccctccttccttccctcatgaaagcatagctcgtttgccattctttcctccagtcacaagccatctactgatgcacatcaccatgctcatgccattaccagggactttctatcagcatgaagacatgaaaatgcctgggggagaaagggtgtggggagcaggtagcacccctgcaactgcccggtagcatttatacattgctctcccaccttggtttctatccatggctttcctcgtcagagcatgttcactttaacctcctctagagcaatttcttggatccttcaagggctcaagaactaagcataagttcaaaagaaactgagtaggcacctaccttctggaaacaacatccatagaaaagacttgattgctatggtctgatttatgaacctgtatctcatatcaggttagcatttgcactagcattaaggtattttcattgagatcatttatgttttgaaataaatactacaacatcaagaaactgtatcagttggagaatagcaatgtgtatgatttgtgtatataaatatgcacatcaaagcacttatttatttcagagagttgtataacaccgtcagagtaaaaattgagtgattctcttctatttctgaccctacttctaatgtctcctctgtccctctgggcaaaaccatttaaaccttttatcttggtttcctttgtgagaaaatggggataatagatacccctgagccattctggagacatgtttggatgccagcccagttatgtgaacacaggagaaaaaagctttgagcttttggcactaaggtgctacataaatattattagcaagctgctgagattttatctttggaaactaacaagcatttctcttctaaagcctcatatctttagcccccggacacatgttcctgatagctctgtctttacagagatccccttggctccacaaggatatagatagtgctttgctgagagagtcactaccgcacactcagatgaaaggtattcattctgcttggcagagtcatcggtagagtagctgctgatcccagcaaggcacggtgggtgatgggaagggattagattaggaagaaaagggaacctctcgttctctcactgagaggactgtaaacctgcagaagcacaacagtgagtggactacgtgtaagtgccaatgtgcaaagtcgatagtgcacacgttacaggttggcgagagatgatgccactcagacctgagtgcaccgtggaactctcttgaattctctctgcaaatgggttgcccctggatgtatagagttattctacaggagtcctgctcctaactcatcagaaacgtaatgacctctgttgatctcaaaggcattttcttctgttaaaagtattgtccattcagcaatatggagaaagatcatttgtgaaaataaaatagaagtgtctgatggtagtgggggtggggggtgtaatttcctccctatgtgagtagcattaagttcactcttaatttttttcttcatttctgtaattggagactgatttatcaagaggatatagaattcagtgactaattctattaaatgtttaaagaataaaataaaagtagaattcaaaaggcttactcctgattagttttcaagatgtgtctaggcacaggaagttaaaaataataccacagtgaatgctctgacccagtgctaacaaaagcttccttattttggtgagacttggcatagaaaatcacacatgtcattcagcggtcctgaaaaaggatgactgagatttggactggttttccagggaataaaattgagtgactttttaaaaagtgctactcctagaatctgggatctaatcaatccaatatcaacttcaagggaataggccaacaaccagagatgaaactagaagacaaataattagaatagcaagcataggttggttttccatgctatgattctgcagcaaatgtggtaatttgggaatactgatttggggaatctcttgtcatgggaataagttgtgttttgtcagctttgctgagtgtctctggtgagctaaaagtgattaaaacagagtgctggccctggtatgtaagctgtaatctatactccatatctaccactagccattttgaaggaggagagttccctgatctacctcacgggatgtgcaacaggcgtgtggctcacccgcttagttgctcaaacccctgatgggagatggagcacacagatgggcaggtgcaggggctggagtgagtgctttgggctccagcctggcagtagtgtctggaggaggggtggtgcctgcagcccaagtgttacaatgctcttttagtcttgctctctgcaaatggcttaagtgttaaccagctcaatagaccttctgccatttcacaagggtagagggccagtgtgacagctttctgtattcccagcctttgcccagtgtcccagaagaatcgggtcacacacacaggcttgaaggatgaatgtggggttttactgaatggtggaggtggctctcagcaggatggatggggagctggaagggggaatggagtgagaagatgatcttcccctggagtttggtcatccagcagccaatctcccctctgaccacccccagtttaactcctggcattcacacattccttcccttctctctttctctgctgtgtcatctgccatttgtctgcttgtctcctcatctcctcatctgcttctggagcctggcgtttgggatttatatgggtacaggatagggggacatgtcagggaagaaggcaacttttcccacttagggccatgggtctccaggcttgagtgtagggcctttgctggggaactaccttctttacccagtatttccctgtctcctgtccatatcaatttcatgaatgtgtggtcacaacatgaacccagaatttggaggttggaaagtaggagtgaatgcactcaatctactagggtgccaattcatagcatctaatatggtaatgatgaattagcaatagaatcttttggtaggggcagacttagtgaatcttcaaatgtggcaggattttaacatgaatcgaatactatctctcagtcaatacaattacctccaccactccccagttcctaattcaagggttatattttcagtaactttatgtattcaaaactgtattagatgctagaaatacaaagatgagtaagacattattaatctctgtccataaaaagatgaaaactagtgtggaagacagccataaaattagagattaatcttatctagaaaattctagaaacaggatgaagcacaacagaggagtattttaggcaacctcaaggcatttaacccaacctggagcctttagttaggttagaatatggccaggaacaggaagtcaagattcaacaaattgcaacactgcaataataactaacatcactttctaatagtgtttatagtgttttctaatatgaaatcaaaatctgtctttggataacttttactcactccctggtcttgtttctgttctctgggatgacacagaatatatggaattcactcttactctgcttagtactgagaaagcaaaaattaaataaggcattcaaaattcttgtctgtataggggccaagggaaagcttccccttcaccctctgaaggtttgctgataaccaactgacaaaaggaagattcacaggagaaaaagcttaaatatttatttgatcacagttgtatatgacatgagagcctttagaatgaagaccaaaagatacagaggaaaccgtccatttttatgcctaggttcaacaaagtatggacagccatgtagaaatagggttggattcttcttggcctctctgagcagtgcttcttccttctgggtgtggggaaaattcaccatattccttaggtcccctcaaaggcccctctattcactcttttcaggaagggcgagaggaccaatgaataaccaactttctggaaaggggggtcttaagacctacagtcaaacaaagtaggtcagatcatttcttcttttgttttctcttttcaagaggcagggtctgattctgtcacccagggtgaagtgcagcggcctgatccatggttcaccacagcctcaaattcctggactcaagcaatctgccagtctcagcctctgaagtaggtaggactacaggtgcgtgccgacataccacactaatttttaaaaatttttgcagagatggagtcttgcaatgttactcaggctggtcttaagctcctgggctcaagcaatcctcctgccttggcctcccaaagtgttgaaattacagatttgagccaccacacccaacccagataatttctgtatggcccgtttttacgcagaaatgtagagggaaaattagagtccgatttttaggttttatggctggctttggggaaaaggggttctgatttctagtacccatcagggggaagagggattctagtttctaaggtgcctccagggagaatgggactcagagacaggaaggcagaagaagctcagagagaaagttttgcttctgaggctctttcagaaggattgcttgagctcaggagttccataccagcctgggtaacatttcaagactccatctctacaaaaaattttgaaaaaatagcctggcacatggcatgtacctgcagtcctagctacttgagaggctaaggcgggaggattgcttgaggtcaggagtttaaggtgtggtgaactttctgaggctttgattttgtggtattgctttctgagccttagacctagaacaagcattcaggtcatgggggaagttcataggagaatctctattttttaactatcaaactgtgactcccacattggccacttggggatgctgtcactcataggcctgtcatacacctttggtgggtagggacaggaaaggagattgagtagcataagataaagtcctccccaccccacccatttcaataataggatccacatttatcatatgccagtctgagacacttcctgaacttcacgattcatacagtgttagagagtggtctatacctttctccatgacctccagcccacacgaggttcagtgaccctaatgccatggaggccaggatgctgtgattgagatgagagcaggggtaagaagggtcttttctctgctcatggagcactggaatgaagtatctttttgggtgctggacagtggggaggtcaagactgtgggcagaggaacactggagccaatgttgggaataattctcatgcaagcaaagatgtggtatttggctggtcacaaccccagaccttgagactccagttccacaggggtccaggatattgtttccatgtacaagatccatctgtgagaatccagcactttccaccacctgccgtggtatggctgtggtcccatgcaccatcacctttggcttcaacttctgcaatgaccccctaattgataacctggctcttgagttgaccttacagcaaacattctttttgaagaaaagtcacaggacttcaccccactggccgaaaccctccactattagctgccactgcacacagagtcgaagcctaaggcattgcacttacacattttcatgttatattattgcatagatgttattagtttctgagtagccaggagagcattttttctgcaattaaacatatcgaatgcaccacattctttaggtcccctcaaaggcccttctattcactctatgtcgggaagggtgagggaaccggtgaataaacaaaggtccttgtttaaaggctgttatgaccataaagtctgtgtatttcacagcccatgacagcagcatcctgagatattatttattgtcaaacttctcaggccacacatccactgcaatggggaatgggactgagcaaatcgcaagttcttggttctatgttccagttgcaatcttgctttcagttttcctgctgttaaaacagcttttgctggtagaactgtgggaagtgagaatagatttccttttacctgctgtgcatcagcagaaaaaacaagtctttcttttctcctggcagctgagatttctgagttcttcctagaattggatgttatatatgatctactttactcatgcccacctgcatacacaccaaagcctgatgagcggtacaaacccacccaatgttttcccccaaaacagaagtaacatgagcacatgtggaactgtcagaggtgtttgaaccagggcaactgcatcttgaataggagcagggtaaaatgaggctgagacctaccgcgctgcattcccagacagttaacgcattctaagtcacaggatgagataggaggtcagcacaagatacaggtcataaagaccttgctgataaaacagtttgcagtaaagaagctggctaaaacccaccaaaaccaagatggccacaagagtgacctccggcggtcctcattgctacattcccaccagcgccatgacagtttacaaatgccgtggcaatgtcagaaaattaccctatgtggtctaaaaaggggaggcatgaataatccaccccttgtttagcatattgtcaagaaataaccataaaatgggcaagcagcagcccttggggctgctctgtctatggagtagccattctttcattcctttactttcttaataaacttgctttcactgtatggactcgacctgaattctttcttggcgagatccaagaaccctctcttggggtctggatctggacccctttccagtaaaagaactattcattttatcttttagtcatcaccaagcaaacacaattataaataaggaaaataatatatgattgtaattttactcataatcccaaatgtctctcatgaccagcacacctttggtgtattgggtctaaatcaaagaaaaattcgaggagttgaatgaacaatgttttgatatcttaatgcactttggagaaaaccaactgttgcaaaaagctaaagaaacaaaaattcattgtttatagatcaggccacgtgtttttcatttctgcaatggcgatgttgttgattcccatggaacacaatgagagtgtgatcttctcctttgagattgtatttattgataaatgcaaaaatgctaatgaatcctaacttgctggttctccatggccttccttcctcccgccctttccaagaaggatgcagtatctgtcagaggcatttgaaccagagtggctccatcttgagtgagggctaggaaaatgagacttgaacttgctggtcggcattcccagaaagttaggtgttcctagcctctagatgtttacagttaagggaatagactgataacgttcagtaaacagacccagaattgggagtgtgctattgttctggaacatcacatataagtaaaggagggatttcctcttctgaccaagaaggaataacatagactggcttaactctcgtacctgaaacaaccagaaaaacaaacaaaatatacgaaagagtggttttatgactctggaaataaggcaatgaaggacagtgctccctgagagccaggaaactaacaaggtgaacaccatgtttggcacagctgactgccttgacagggctgtagggcacacaacccactctggggaaagaaccatctgaaatagagaaaatagtgcatggtgctcacacagggctggaaagagtgcctgtttccaccagccagactgaaaaaaaccttgtaatgcataagccatttggctagactactcagaaaggtcttgtgtgaatagtggggaatatttagctgcaggctgagtcctgctctgaatctccctaatgattcacaatagcaaggctccaacgttgccaattgtctccaagtaacttaacccaaactgagcagatcgctcaaaaatgtttgcaggaatataaaaatatctggcatcctaaaaagaagactcacggtgtttggcatccaatcaaaaatgtctaggcatgcaaagaagcaggaaaaaatgatacataatataagaaactcatcaacagacactgactaagaatggatgtatatgtgagatcttatttttggtctcaagattttgctgcttgtttgcttcttgaagtctcatggttttaggttttatatacaggtctatggtctatcttgagtaacattaggatgcgtgtatgtttatttgtatgcattatttgtaggcataaaccgaagttcatttctttgcatatgaatatcccgttgttccagcaccatttgctgaaaagactatccttttttcactgaactgttttgtacctttgccaaaatcagttgtgcatatatgtgtgagtctatgctgttccattgatctacttgtctatctttatgccaataccacactgtcttgattactgcagctttctaacacagcttgcaatcaaatagcatttgtctttcaactttgttctatttttcaaagttaaacatcttaacattattaagtcttccaacgtgtgcccagtgtatatctccccatttatttatgtctccttttatttctctcaagaattttttgcagttctcagagtacgagtcttatacatatcttctcacatttattttgaaatatttcatatttctgaagctattgaaaatagtattgattcttcattgctagtatataaaacagtacatgatttttgtatattaagcttgtgtcctgtcactttgctaaactcaattaataatagttcaggtagcttttttgtgtattcaattggatttttgtttatgttgtctaggcataaagatggctttaccacctcctttctaatctgagtgccttctattaatttttgttttcttactgcaccggttccgatctcttgtaaaatgttgaatagaatggggagagtgggcatttctattttgttcctaaacttaaagaaaagtattaagtttttaccattaacaagaattttagatttttagtagatgcccttatcaggttggctgaaggagttcctttctattcttagtctgctgcagggtttaataagggctggagtttgggttttttaaaaatgctttttctacatctactaagatgatcacattgtttttttgtttttgttttttcatcttttttagtttgacaatattgtgggtaacactgattggtcttcaaatgttttgaaacaatattgtgtttcaaattacttcttacttctgtgacataacctagccttctctctctttttttttttttttttttttgagacagggtcttgctctgttgtccaggctgaagagcagtggcgcgatctccgctcactgcaaggtccacctttccggttcacgccattctcctacctcagcctccctagtagcagggactacaggcgctcgccacttcgcccggcaatttttttttttttttttttttttttgcatttttagtagagacggggtttcaccatgttagccaggatggtctcgatctcctgacttcgtgatccaccggcttcggcttcccaaaatgctgggattacaggtgtgagccactgtgcccggccgacataacctagccttctttgtctgagtgtgtgtgcatgattaaatagatcacagtatcacattctgccaggacccacatggctgcaatgtattcttttaccagcagagtagcacctgaatctgagcaacgcctcagaggcgatggaactgaacaggagtgaatctgcccaggcatgaagtgctcccttacaaaacagtgtgattacagtttgtgttctccggtgtaattacctaggaggatttcttcagtcttccgtaaggaggaagacagtgttccccactactcagagaactgttgtaggtgttcttcctgctttttgaaaaactgagagctgtggccagcctgtcagaacacgtcctcttcttttgggcatattcaggatttgcttactggtctgttcaccctgatagaagttactcttctctgtctgctatatagattaacaccactcactggaacttccatttcccaaaattccaattctgtcttaaaatcttttctaagcacggcttctctctacatatttggtgcacccttcagtgattacaaagatactccaaggtcctgccatgatactgaacaaaattcagatgtagcaaaagtgatcaagaaggcagcaaaggcttatcattgtggggatgtagtacaacctcccagctgtgaagccttgcacacatcactgcatatatctctgcttgacttttctgaacctgaattactcggtgaacagggtaccttgcagtttgaatgaccctcaagctctcagaacttctccaactttaaagcgccctattctaaaagagaactgtatttgttaactccaggggagacaagcttgtcacttcagccttccccttatttaaaaaaggtaatttgtgctgattctccagtacaaagcgcttaagtcaattcgtcatagaaagaccgttaggtgtaaagtgataaatatactatgtcaactttgaaaatgtattagcacttttcaccgtaaaaacttcagatttcacaggtcagcaaagagagtcttttgtttaattgttttgcatcatcaaatatcaatctgtagggtaggggacatctcatttagggaaaaaggtaggcacacctcactttacagaaatttctgctgaagccctaaattagtgcgttggtctcccccataagccttctggcttttagagaacagagactgcttattcttatattaaactggggaaggtgttctatattgcataacctctcagaagtataaatgtgtattgtttctctttatctcgaccttccaagggccccagcagcctgcccaaggcttcactatccttgcaacaatcatggcacggtagtgatgggaagaaaagctgcaggctcagtgctccttgccttcagggaatggtgctgattcctgttgcaaagcagacccattatcagaggcccatcaaatcacaccattcccttccctgctgtctcttaggcctgcaatgacaaagacatggcagaaatgccactatccctgctcctttgctttggccagatgccactgatggatcgttcaattcttccctgcagaatcgtgccctcagatccttctgacagtgtgccagatatccagcatcacctttgcagtttgggaagtggcacccatcatccacccagcgtgcctttcttgattttgtccatggtgctgagattctgcgtggcccccatgcggttgctctcactccatgggtctccatccagggtgatgcacaccctcctaccacctgtgaacatttggtaatatctagaggcgttgctggtttccaccattgggagtgggtgcaactggcatctagtgggaagaggccagggatgatactgcacatcccatgttgcatagaccccatcccacagccaagaatgatcttgttaagtgtcagtagtgctgatggtgcacagacagtgtcccacagcaaagaataatctttttaaatgtcaatagcatcaaggttggggaaccctggtgtgtctgagaaggaaacgtgggattctctctcctctaggattggattctgtcccgtggtactgtctacaatgactgggattttgatacctaaatcttcccttaggaagaaatctttcctcaggaaacttaattatcctgccaatgctcaccagctggagtttgacttcatatttttattggtttcctggaaacctctcattgcattccctcaggcatccacgatacccaaaccatgcacatgagtgacacactgtgtttagcttgcacagcatctcatgccacaaccattcccggcagattcagctcattctcccatcgcagccctgctcccctatgcccggttaccagcaggtctcccaggtgagcctgctgctccaggataaaactgtggccacgagccaacactgaaaactgacacctgcggaagttggctcaagtgctgcctgctaacaaccgaataagtaaacctttgctgcagaacctaccatgtaacaggtgtcttctaatatttctctgatttttctgagcttatcctaagataactttttcacacttcatttgcagagcaggaagacattatgtgtgtgtgtgtgtgtgtgtatacacacacatatatatgagaatatagagagaatatatgtaaaggagaatacatgtaaagagaatatataatatatatagaatatatcctatatatttagaatatatagaatatagttattctatatatagactatagactacattatagtctatatatagactatagactacattatagtctatatatagactagactacattatagtctatatatagactatagactacattatagtctatatatagactatagactacaatatagtcttatatagattatatatagaatatattattttctatatatagactatttttctatatatagtttatatagattatacatagactatattattctatatatagcttatatagattatatatagactatattattctatatatagcttatatagattatatatagactatattattctatatatagcttatatagattatatatagactatattattctatatatagtttatatatattttatataaagtttatatactgtttatatattgtctagactatgttattctacatatagtttatatatagaatgatatagtctgtatattgtcctagcaaactcatagactttattattatttgatatatagtctagtactgatagataatattatcattcaataaaatatatagacatatacaagatacatagtctagactatacatcaaatgataatatagtctttctgtactactatatatagtctatatatagaataataatatagtctatatattgcaaggaggaagataatggctcattttttatccagggtaaaactcataaacatgtattactgagtacagatatcttaatagagacaagaaaattcaaattattggcaaggtactgtacataattgtatccaaaaaaatcaggctattttgcatcctagccaagttactctgcccagtcacaagatcacaaaggccaagttacatgatcactaaaggtggcatgagaggctccgactcatccagggagtaagagagtgaagtcagcagtgggaatgttggagcagctggtctgtgtaaagatgtcctggggaaaaactgggtcaggcttggaagacaaggcaagcggtaccagagaaataagcttgactggaacgaggcagcaacagaggcactgatggaactccgttctagagttatgggaactaaaaggtactccgctcggccagccaccaaatgaaatgggtaaaaagggctgcttgaaatgtaactgggaagatttcataagcatctatctgtatgggtttgcccggactgacataacaaagtgccacagaccgggccgcttaccacagacattgattctctcgcagtcctggaggctggaaatctgagacaaggtgtgagcggggctggttcctcctgaggcctctctcctgggcttggagatgctgtcttctccctgtgttctcccatggtggttcctctctgtgtaggtctatgtcctcatctcctcttcttataaggacaccagtcctgttggattagggcccactctagtgaccttgttttaccttaatccaatcttgtccattctgcagccctagggccacatgcagcccaggacagctttgaatgttgcccaacacaaattcatacttttttaaaacatgagatttatacacggacctgttttttcgctcatcagctattgttagtgtattttatgtttggcccacaacaattcttcttcttccattgtggcccagggaagccaaaagattggactcctttgccttaatcacttctttaaaggccctacctacaaatacagtcacattctgaggtcttgggggctagcacttcagtgtatggtatgggagagggggcctcaactcagctcataacagcatacttctaatggtggttctcagtctttattttgaggaaagtggtcacttaaataatgacatatggaaaagatacaatttaagtaatagagacttcccacgcaaaccccatgtaaggggaggaatcgaacgtatcaagggcattccccaagcccaaggtgatagaggtgagaaatgctcacttattagtgccaatttcaatctcctgatagattttcatttagtatgctgtaaaagaaaatatccctgcagacactggcacttgagggattacagtggtggggagaaattcccttatttatttgtggaattcaatgaagcatttcagagtccaccttctggggataacctgttcattgcaatggagtaaatcaatagccttcatttagattcttaactggcaatttgatctcattcactttaaccagcactcattggctggaggaatgatggagactgggagcaggctcctaaaaagggtcttgaaaatgttatttcaacaaagattaattatgaggcattgagagtttcagaaaggttcacattttttttctaaagctcttctaagccaatcttaaatgaatcctcagaggactatttctgtgggtgtgtgtctgcttgtgtgtgtgtgcatgtgcatgtgtgtgtcttgccccattccagttctccatccccatgctgaggaggctggaggattcagaatgcagaatcaggtgcatttttaaaaaatcattatgtcagtcctcaccaaaacactggctatttctatctttccttctcattttactctgctataggagtctaagtaaatcatctttaggaaataccaaaacctaccaggggttttagattcatggcggccaacacaacctagtattgatagcccatgtaaatgtttgccatccagataacaagaataacgacaagagaaaactaacatgacctgccccatagtgtgctagatccacatctcttggggaatgttttgaagcaagttaatacaagctacttgataaaaggcttccgtgatgaaatgagattggggaagctgagttaaacaaaatcaaacagtgttctgtgttggacacttctcaaatccttaaccatgctgaaaagcttagagtatttccaggagaatagcatagcaccccacatcccagacctgcacagcccctgctcaggccatcttgtgggacaaacagtatgcaaaacacacattctggaacatgcttgagtagaggggaggccactctctaacttgggcacagttctgctctggcacacactgacaaggtgacactgggtgactcatttagtccctctgtaaacggcccttcctcatatgcgagaggccatggaacgttggcctctcagacgttactggctctaacattattttgccaaaaataaaataattagtgtggatgtgttataggaaaggggtctggatacagaccccaagagagggttcttggatctcaccaagaaagaattcaggtcgagtccataaagtgaaagcaagtttatgaagaaagtaaaggaataaaagaatggctactccatagacagagcagccgtgagggctgctgcttgcccatttttatggttatttcttgacgatatgctaaacaaggggtggattattcatacctcccccttttagtccatatatggtaacttcctgatgttgccatggcatttgtaaactgtcatggctctggtgggaaggtagtagtgaggatgactagaggtcactcccgttgtcttcttggttttggtggagttccactggcttctgtgcaacctgttttatcagcaaggtcttcatgacctgtatcttgtgccgacctcctgtctcatcctgtgacttagaatgccttaagtgtctgggaatgcagcccagtaggtctcagcctcattttacccagcctttattcaagatggagttgctcttgttcaaatgtctctgacagatgtaataggtaacgctcagaaactggcatcagaggctatgcaacctgaacagaattggctgacatatatctccgggtataaagaaagtctcagctttcccctgagatgtaatgatgaatgtccctaaagcttccttcacccttccatgctaaactcgctccactgttccatcatctgctttgaagccacaaggacagccagttaggactttgtcatcatcacttttaacttttgtttaacttttaacaaagattggcctttttaaaggctcaattatatttaaaaaaaaaacaaaacaaaacttcctgccacttacgcagtccattcattttaaacaaagttgataatgcaagtcaatgggaaaagaatagtctttttcaacacatggaattggaaaaactggatacctatatggataaaaatgaactttgatcccttactccatactctgcacaagcattaaattaagatcaactgagatttgacctgaacataaaatctaaaattttgaagcttttacaataaagcaaaggtagacaaagactccttctacaaatacctggcactaaacattaaaaaatcataaattgtgcttcatcaaaaatacatctgctcttcaagatagatgaaaaggcaattcactgactttgaaaccaagtatttgtgttcagaatatgtaaaggaattctaaaactcaacataaaaagacaaaaataaaacaaaaacacacgcaaaaaaaaaaaaaatagaaaatgagcaaattatttggacaaaaatctcccaaaaaaggaaatgcaaatagctagcaatcacaggaaaagttgctcgatattattagttatcaaggaaataaaaagtgaaaccatgagatactcctacccattagaatggctacagttaaaacgactgacaatactaagttttgatgaggatgtggagcaattggaatgctcatgtattgaggtgagaatataaaatggtgcaactacttttaataactaccctatggctcaacaattccatttatagatatataccaaaaagttatgaaaacatatattcatccacacaaagacctgtacacagatattcattgtagcattattcatgataacttcaaatggagcagaacccaaatgcttaccaaaggataaatggataaacttactgttacatattcatataacgacatactactaacagataaaaaaaggaataactattgttacctgcaatggaaacatatataaatctcagaaatagtatgttgttaaataggccagataccaaatagaatatgttgcatgattccatttatataaagttctagtagaggcaacatgaaagccatggtaataagaacagcagttgcctgaagttttggggtttggtgatatgaggaaattttctggagtgatggaaatattctttatctttattaggctgatgttttcacaggtgaatatatttgtgtaaactcatcagaatatataaaggatcctacaactcaaaatagaattttaaaaaaccacaaaaagttattgtgatggttaatattgagtgtcaacttgattggattgaaatgatataagtattgctcctgggtgtgtctatgagggtactgtcaaagaagattaatatttgagtcagtagactgggagaggcagccccttcctcaatttgggtgtgcaccatctaatcagctgccagcgtggtaggataaaagcaggcagaggaacgggaaaggactagactggttttgtcttctggcctacatctttctcccagctggatgcttcctgccctcgaaaatcagactccaagttcttcaactctgggactcggacctttgaacacagactgaaggctgcactgtcggcttccttacttttgaggctttgggacttggactgacttcctggatcctcagcttgcagatggcctattgtgggacctcaccttgtgatcacgtgagtcagtgctccttaacaaactcccctttgtatatacatctatcctactacttctgtcactctagagaaccttgacgaatacggttatgcatttttattaatgtaaattatgccttaattaacaataaataccttctcaacctccaaaaagagactttctgtctgaaacttgagaataagtctaaagttttcatttaataatgaatttgtaaaagacaggaaaattgattttggcattaatttgttcaacaaatatctgttgagcatgtcctatgtggcagaggctgagtgtggggtgtggagtgggtgaatgtaaggaacatatagttcctggctccctagagcttattatggtctaggggttggagagaattggtacattgggattttaaagggggtgccaaaagtggtgatgacaaagttcagggaagaacaactggagtggagggagggcatcaacatggatgctgaaccaagccaatgtactgctaagagtgaggtggaaagtatcatgcgaaccccagagcttcaattgtcaatacatactggggtgtgaccagcagattgatagaagacagcaaagagagatgggtaaatgccaatagagcagaatagcatgacttgtcaagagacaggacttttcaaggtgaaaggaagggagatggtcctgaagcagcagtcatgtctgtgacccaaccaagccctaagcgatgacagatagaaacagagtcagggtcctcagaggacaacttagttttaattaaggacagaagttgagaagaatattttaagaaacatttgagggcatattacagtttgctggctatgggttagggtagggtagaagagagagatttggaataaagggtatggatgggacaagacaaagcagggcaccagccctaccttggacctttccttaacttgagaaagtcatgtccatgttgattcagccaatctgactcaggtattatgtaacttgaaattgaaccatcccaactgatataagtggtgatactgagtaacacaaatgtgctttctggattcacacatgcacttttttttacatgaaaagttcaaacttctatgtggagatttttttcaacagtatcctcaagaagtattcatcatgcaactctttctaggaaaggtattttaaaaagaagaaaaatgtcatttctggccccagaatgtcaagacatacatctctgagagatttagttctaattattattgtagagtcttgtgggtgtttcttataattttaatttttacaaaaaacaaatctgtccatccatgcatctatgtatgtatgtatatatgtatgtatctatcttcatcatcatcataattatccatctatgatctatctattgtgtatctatctaataatctacctatgcagaactgcaaaattcacaggactggcccatactgccctctgctccccactttgtctaaacttcaaaatgaagtttctggacacagggctatgaaatgcaaaatgaaacaactcatgtccaaagctctgacactctgctgctcatgaaaacctgcaatatccaactgagtttttcatttttaacatcagcaggtctagttctctatcttcatagagagttatttttaattttattaggggataaattcttttttaataaagaaattattaggtatcaaaataccacaatctctttatggatccaactagattatgtgtatgggcaaagtattttcaacttaagaataacattcctgttccttgaatactattttgaaagtttggattaagggatattaacttccttaagacaaaacagactcacagttgaaaactactcaccttgtatatagaagttgcttaattaatatcaatgatttttattgaattggaacaaaatagactataactttttataagatacatatgggtttgttactaaatattattaaaatgaatgtaatgcaataatattcttattttgaggtaatacatatatagtctgcaaaaattaggtttcctggtgtcattaaccacttatgcaattatttttctgaaatgaatacacatgctgtacgtgcagttttgcctgatataagttttaaaacaacgtatattggaatcttggaactaaaaatgagaaaatcagtgtccccttgatgtcaatttcagtttcaactacacttgctattttatttttaatcagttacttacattatctccacattgtcacagttgatggtatttgttttcttctctgtgaccataatttgcacagatttaaccataatgcatcgttaaagattacaagaaatcttttagacacagctcctctcagttgctgagagtccaacctttactcatttgttttcttcatgaatatatatttcctgagttgtatgtttgtacatagctatttgtagcctttgaagtttatggaagtttgtttggttgcattcttggggcacattttctttccctgaggactgttaaggttaggatatttgaccctttcaaagctcatgttgaaatttagtccccaatattggaggctgggcctaatagaaggtgtttgggtcatggggacagagccctcccattgaataggttaatgtcctctcctgatggtgaatgaattcttcctctattagttcctgcaagacctgcttcttaaaagagtgggccacctcccggtttctctcttgcttcctctctcatgtaatctctgcacatgctggcttcccctcctcttctgccatgagtgggagcaggctgtggccatcaccagatgaagatgcccaattttgaactttccagccaccagaatcataagccaaatcatctcttttcctttataaattatgcagcctcgggtattctttatagcaacacaaaagggacaaggactttttatatcttgccccactgtcttctagcatttcatctgtcacataaagaaatattagcctcctaggtttttttttctgaatatccacagaattctttccataacttcaaataccaggaatttattggggtatttgttaattattcaatataaacacagccttgtaattcttgggctatttctgtctgcagattcaaatttcattgtatttcaggaatttcaccttgaattgtatctttgaaaatttgttttcatgttccattcattttttaacccatgcaaggcatttagtgttaaagatatttgatctcttccctaccacccctcccatccccctctttttctctatctctgtcttccgtcttttactttttgttcttttccatctcacttgctcattttttcttctcaaaaccatcctttgaattccttcagtagtgtctcatctcccttttgctgcttctatcatgacctttgattttggtctctttttgtgtctctctctctgagattctgaggctctgcctattctgtttttattctcatttgtttctaatttgtttccaagactctgtctactcccttttcattctcatttattcctaatttatttctgaggctttacccactcacttttcattcccgtttaacctaatgtattatcagttcttccttaaagccttatattgcgtctttaaattctcatttcagagaaacaatattgtctttaattgattccttagaaataactttgttcatggtttttggctccattgtggtatataatctttccaggtgttatcgtcataaatcatgttctgtcctttttttttcatttcagcatcattttaaaggcccccagctggctctaccctttttaagtagcattgttcctcatctttttaaactagaattttgggcaaagttctggtgaaaggggaagaggaatgtgccaaacaaatgggaagattgggtttcaatctgttatctctaggatttttctcagctggacttggcctgtgggttatctggtccagcatagcaggacatcttctgggctcacaaggaggctgtgcattttacagaacattttaacgtgattattttaccttgacttatcttcaccaggcagctttgggcaaagacggccaggtagcttttatcttattgactcttccttctatcctatgccatgattgaaacatgatgtaggcttccaaaaccaggccatgaaccttgatcttaactttctaagcatgggatagacacatttcctttcaatgtgtgccactcatccactttggataactacgagctgagtccactctgcctgagtcacacatagaaagacatcttctcttggatttcccaaatacctccatccacttctcatacacttggctatcttcctgcatctactgtgatccagggttataggggacctgtagcttcatcaaagataacatttgtttgtttcttcttctcttgtttgctttggattggtttcataaaggaaatcagacaaaaatatacttacactaccatttgaaaagaaaagataaattccttctttcaaattcattcctttttgtttctttccaatgaatctcatggggtgagggggggactgaagagaatgtccaatctagtcaaatccaaaaagtcacaggtataaggcacagaaaattttaccagtctaatgatggcagttttaatgctgtataaggacagactatgcaaaaatgctattaatgaggatgaggagctacaggaagaaacctgatgaggaactgtaattctattagagggatgtatagagccatcatttttttctttaatccaaaacaattagattgcttatatcgacagccacactgaattctaagctatttgtttgaaatgcaccagaggatgcagatatatatatatccttttaccttaatttaaattttattctttccctcccgttttatctgtgctatagagtatatttttcccacttgagctcaacatgctgttgtgcagaaagccttctcttgggaattcccaaaatgttggcccagatgagtgcagcagacatttggcctaggtgagcctagcagatatttacatgaaatattagggagcatccatctgggctatgtgacttaggctggcaatacacgaaagaggattccaatttgttgtataaatcaccctcagagcccccaacagtgaacacatagggggttcttttcattttcatgatgcttaatataatctttaaaaataattaaaattaggtgaagtgtgtagatttctgagagattacagaaagacattagttttgatacctcttgcttgtagcatttgaccaacataaacaaacgaaaaggtttaaaaagaacagggattcttcccagtagtatagtgcaatgggtaggggaaaaaagttcaaaattgatacatagaccaatattattctcaaaactcataccattgtgattgggaagaaatgaatacatgttacttagtcacttcatgttactatatacttatattaaaacaacaaaaaggaaattataggaaaaaaagtcatacatttaaaggatggaagaaaatcctaggtttactcagagctcaagatcccattgggatgaatattgttctttccttggattgttccttcatttcattcattcacttatgtatgcatttatttatttagagatggggtctatttctgtatttatttatttacttatttatggagtgttactctgttgcccaggctggagtatagtggcacaatcatagctcactgcagccttgaactcctaggctcaagtgatgctcctgcatcagcctcctgagtagctgggactacaggtgtttgccaccatgccccactaatatttaagtttttttgtattgattgggtctccctatgttgcccaggctggccttaaacttttcagctcagcgatcttctgccctggcctcccaaagtgctaggattacaggtgtgtcccttcatttctaatgaaggaaggttttcctttgaatatctcacaacagatatttttaaaagaaaggcagatttgaagcaaccatcaacaaggtttacttgaaaattaatgatatttacaagtgcattatataacagaaatgttacagactgaattgtgccacacctaccccaaaactcttatgttgaaatccttacacccagtaccgggaatgattgtatttggagatgggtcattaaggaggaaattaaagtaaaatgaggtcacatgggtgggccctaatccaataggactggtgtccttctaagaagaggagatgaggacacagacacacacagagagatgaccctgtgaggatgcagggagaagacaccatctacaagcccaggagaggggcctcaggaggcaccatccctgctgacaccttgatctcagacctctagcttctagaactgtaagaacaatttctgctgtttaagcattcccatatgtgggactttgttatggctgcctgagcagcctaatgggagtgcaaagactttctttaaataatgtataacaatgttggtttggaaatgactatccagtgttgagttcaaaactttatctttatgggtgctgctatgagtgagtgtctaatttgggggcataatagtgacattcttcgggagaaatgcagactccaatcagtgcagaaaatggcacagaataatgtttaaaaatgccctccaggccataacatggttgggttaggaggaggaatactaaccattccaatcgtaaaacagagaattttgggtttctttcatgagttcatcacctctgaccttcacaggtaagggaccatcacacagacatctgccattttcatataactctctatccaaacaaaggctgaaaattcagcatggaggaactctcccagcacccgtggtcagccccttggcctgcaaccccaccctgggcactggtgtgggggtgggattctttatgaacttgggccccaattctgcttcccctggaaagctggacccacacaacatcaccttcatatgcagaccctcatgtgtgggcacctgtgcctcctcggagctggcggtcagctctagaagctggttcaggacaggatactcccatccaatctgtgcccaccatagaaaagagtcagccaagtgcctgctaccacagggctcttcacacatggaaaagctgccctgtggaagtgtcccaggaaaggtcagggggacaaaaaaaggtcacagtgatttgcctccagacactggacactcttccctggagagtacagggcatgctgctctccaaacctgatcttgctacatttgtgctgcccacagtaggggtgtcactgagttttcaaagaagacagcaggacctgaattgtgcaaggaaaataagtgcttgaattttgtagcatgcgtgcagtgttctactttttagaatgctactgggctcctctggtattcaagaaaggcccccaacagctcagatggtagttttctaatcctgtcttcccatatgcacatttacctcctccacccaagaactgaataacagacatgagtgctcgggacatcatgctgtctactgtcatccccttcctgagaccccctctccaaatctcttgacaaccctcttcttagctccctctttctttctggcctgttacactcaacctctccaacgtcctatcaagtacctgctcaaacctacttcctctcctgctgtgcttcttcttcaaaagtgttttgcttcccatcctccccttctttccttgccctcttccctgcttccgtcttccaagcacttctcaactacaaatgagaaggaagcgatctgattaaacaggtgatgagcagagtcatgttctgaggtgatttgcatttttaaaaggagattaatgaccacatctgacaatgtcaccctgaaatcttatgcagggtgacaggggagtggggatgaactccgttcagggcaggaagccagagtttggatctgaagtacttttcagatgctgaagtcataggagcttgcagttacttcctgggtggagccataaacaaacatctcttctgctgagtggggtctgagaagatagagggaatggtgacccaggagctctggaattatctgtctgtgttacacttgcaggactacacaaatttaactgaaaaaaccatgcttttcatccacctggctgaactcttagcctgctctcctcttattgttccctcgaaggcatcattttttgaaagagaaatttaaactctgtccatctcatcccctttggaagaacgttaagattcctttctgagctttttcatcatctggagtttaaaagcttcccctcctctgtcaactctctttgaatccctcatgtcacaccaaacttcaaaagagacaaatacttttgcatgactccctgcaggctctgttttgccctgtagtgacagccccacgtcttggctttcctgattggaaaaacttctcaagctttctacattcatgatctgcacttcttcagtgcagccttctccagtttgtctctgatctccaatggtccctgcattaatcctgtccaagccacaggtgaccctcatatcatctcagcttctacttcccagtctctcactctcttttttttttttttttttttttttttttgagacaggggtctcactctgttgcccaggttggtctcaaactgctgggctcaaaagatccttcaccctcatcttcctgagtagctggtaggggtgtgagcccttctgcttggtctccagtcctttgcttttcttttttgacctacacaacattcggtggttgacgtccatgttcatgtaattgtcttctctggcttctcagggccaccatgcattcccttctccctcttttcatttattatcttttcatctggtaagacccatcttcccctaaagatgtatattttcctcaaagcaaggattggcttaccttcacaaactgagtctccaatgaccacataaactgaaatgcaatagaaatcatggacagatgtgagctcttcttctaattcctgtgtcctctgctggttcttctcaccaacatcacgtactgctaagtaagcgagtgatgttaagttagaaaatggactgagtccagtaattcatttgtcatgctccaaaatccttacctgagatctatctactctccaaattatgctcgttagaaatacaggaagatccttttcacatgagctaattagggtgaatacatgtaagtgttggtaagaagtactagaaacactggaatttgtgagatttcattgaagaaccaacttccacccagcccttcacattgttctcttttggtagtttcttgtcatttcctccttttattatcaatagagctgctgtgaacatgcatgtacaagtttctgggtggacatatgttttcattttttggggggtgggtagacatgaaagagtagaattgctgagttatatgatgaatctgtgttctaacttttcagaaactggacttctactccttcctgatttcaccttccacgccatttctgtagtgaggcccactccttggccttacaagacctgaattaagttaggtgcccagagccgttctgtcattgactctgttctttcccttgctagcctgtgtaataattggcaatcagaccttcacgtgagcaatggtttcatatgtctccccaactatattacaagttccacgggggcagagctatgtctatctccttgacctctgtatctgccatgcctggcagagggctgtgaacaccggtcaccctccataaacactgggagacaaacaagggagtcagtagagttagttttttgcttttttacccccagaactcttagaatatgatttgagcttttccttcaacgaagtcctggggcaggtgatcattcatagatgacatgagggagtgcacagcacatgagtttgcaggaaaatgtaaaccccacgttgatatttgatccccaatgttggagatggggatttacggggagtgtttgggtcatgggggcagatccctcatgaatggcttggtgctgccctcatggtaatgagtgggttctctattcaatcctgcaagagctgattgttagaaagagcctggcaccttcctctcctctttctcttgctgcttctctcaccatgtcatctgtgcacacaacagctccccttcccattccaccatgagtggaagctccctgaggcctcaccagaagcagatgctggtgcaatgcttcttgtacagcctgcagaactgtgagccaaataaaccttttctttataaattatccagcctcactcaggtattcctttatagcaatgcaaaactgactaagacagggtatcaggagacctagctttgcctgcatctgagaacttcatcaggactcttggaactatttagcccacagttccaaggttgatttttgtcacagtaaagttcaggtagtaagaattctcactggtggctgttgagggtggtggtggtggggatgggtcatatggagaattagcagtgggagactagaaattaaagtggataaagggaagaattaaaagtcaaaaacagtgtgagggaggaaagcaatggatataacacctcagatctttatcctcgagaggccttaaaaaatctacttaataataatcagatgctattctacaagtactttgagactagacatgtgatgacttgtaggagcctgcactggggctgaaaatgcatgcaaatctagctgactcagctccagtcttaactggctcataacttccttcataaacatgactgtatgtcagcaaggaaatgagagagaataacagcacatcacataggcatgaaaagtatttgcaaagcagaagttcccaaaaatgacattttgcagtgttttccagaagcagattcagaaaactgaagaccaaagtaatgagggagccctatcatgcctagatgagcagaagcataccaaaggcttagtatttccccaagtagtaggcacctcaaacttgtttaaggaaaatactcttcttgatgaaacagatactgcagttgaagcaggaatgtgtttggtgtgctgccttaaatagcatgggtagatgttcaaacatgttaggactcactggccctaggaaagacccgcaagtatctggtctacaccaagaaagtgacaatgtaacaccaaacaccttttctcctctaattaccaagaaaagtatttctttcccaatggtggaagacaataatgttgggaatgatgaagttttctggagtgtgaagtggatatgtcttataagtttaattcacagcttcaccacttcataagtggataatcgaattgtgcctcagtttcctcagacttggggatattaagagtaccctcagtcaccacaaggtgggtaccaacataagaaaagggtatagcaaaatcccaggggcacatgttcttaaagtgcctagtgtgggattagaatgacaagtggtagatgacctacttgtgcagaaatttagagttattttgtgattttcaaatgatcatgtgtgctttccatatgctgtccagactgggggtgctggagctagaaagggaagaaggtttccatatttcctgagactggagtcacatcctctcaccaatgcactcacctgctgactaaccagtgtacttctgggaattgcaaatgcatgaaatggcacccattctagactagtcacggcagtgttggtgatggccacagaccaggaacgaccctgatgtttatccgtagggaactaggtcatgagccatgatcctcatcatggatactgggcagctgtggcaaagaatgaggtatccttctgtctgtgcaccgggaaaggtttccaagatacaccacacagtgagaaaaacaagaagcagaacaatgcacggtgtgctacctcttacattacaaaggaggaaatgtaaaattaatttacaaatggccaataagcacatgaaaacatgctcaacatcactaatcattaggaaaataaaaatcacaactacagtgagataccaccttacatccattacaatggttgttctcaaaaaagaagagaaaaacagaaaagaaaagtgttggcgaagaggaattggaacgcttgtgtagtgtttgtgggtatgtaatatggtgcaaccactgtggtcgtttctcaaaaaattaatcatagacttaccacaagatgcagcaattcggcttctggtgtattccaaaaagaatggaaagcaggggccccagcagatatttgcatgtctttgttcatagcagcattattcacaatagctaaaagttggaaacaagcccagtgtccatccatctgtgaatgaataaacaaaacgtggtctatacatacaaacgaatgggattcagccataacaggaagggtggttctgatgcgtgcttcaacgtgaataagtcttgagctctttctgctaagtgaaataaccagactcaaaaagacaaatattgcatgattccacttaacagaggtgcctaacgtcatgaaatgcatagacagaaaatgaaaaggtggttgtcagtggctggagggagggagaaagaggagttggtgtttaatgggtacagaattccagttggggaatatgaaaaagttctgggtggggatggacagtggtggtggttgaacaacaacctaaatgtacttcctgccactggatgtacacttaaaagtggttaaaatgggccaggcgaggtggctcacgtctaatcccagcactttgggaggtcgaggcaggcagatcacgaggtcaggagatcgagaccatcctggctaacatgatgaaatcccctctctactaaaaatagaaaaaattagccgggtgtggtggcatgcacctgtagtcccagctactcaggaggctgaaacaggagaatcggttgaacccaggaggtgaaggttgcagtgagctgagatcaccccattgcattccaggctgggtgacagaacgaggccccttctcaaaaaaaaaaaaaaaaaagaaagaaaagaaaagaaaaaaagtggtcaaaatgttgaattctatgttatatatattttaccataatttgcaataattcctattgttttgcataaaacagctgtagaaagctttgcaggtcatgaacagcatagctggccactgaggctggtgtggggctaggacctgggtgcacagggaacaggtatgagacacaggctcttcatgcctgcacacatatacggatacacacagatgcaaatttctgagccatctaaatacaacacctattcaaaaaattaaacagaaaaaggaaatgtaatggagctaaaggataagggtaggtgggcggctgctcaggaggactgtggaggccacatcacccaaactttgaggcctctcttagcagctggagtgcatcccggagacttgggaactctggaaagaggagcaggagagggccatggccagaggaggcctgaaaaagatcatctctgacacagagaagaagctggctcggatgctggtggccactgtggagacaggtagacccagggagacaactgtatgcattcaaggaggaatgggtggtgatgcaaacctaggtggaggccacagggtgcagaagacaggacacaacagagagagatgtaggacatggaaaggacagaaaggagtgatcaccggacgtaaaggggcaaggaaagtggaagcatgagagcatctgctgggcatctggctgaggggtcatgtgcccagggtgcccttccctaagggagaacccaggacaggagcagattcagaaaaaacctcccagctcactccagcaagaagcagaaaagggactggttaaaggacagggtaggaaggtcaccaagctccaagggccctcatgaagccagcttggaggccacagggcccagggcaaggaccaaaccacaggcacaggacagctctggtcaagaccttctggctaccgcaggaggcagaaaccacaccctgcaccctgcactgctgaggctggccctggggtccagaagcttctacaccagaagcttctgtccccgatccccactgaaaaaattaaaacaaaaacaaaaagcaaatcggtgccatgcaccctctgcttcctggtgctgttcaggatcctgagtctttcacgggagcacctaatggggaaagcctggacccgtgtcggtgtccctcctgcaaggagtgctgggaaaatgaactttccggcttcctccttgggaaagaagaacattccccatgtgtactggtggcatttaaaaactgcagggcagccagagaacatgcaccgtgttccaccaggagagtttccagcgggatgtcccggtgaagatgcccgtcccaaggtgggtatttgagctgaggaactgagaagctgttttctgcctagagttagagatccgagaggcatcagcacatggaagggagggaagctatgatgcctccagggtgggagatcagatgaaccaggagaggcagggcccgggaggaaccccggggagcagccgcctttaaagcctgggggaagtagcttcagagaaggtggggcaggttgggtggggggtgctggaaaaatataattaagaaagaaatttctgctcatcccagaaacccccatcacatccgtagacgtaaaagaaacctgtcttatgattaagcattaagccaaaatgtgatgcaatctgctgagagatgacaaagtcagaaataaatcccactttggatccagccaagcaggtgcaacccgttacacacatggtctccagatagacggtgactagtttccagttgaaaggactcaatggcaccatttgtcacacatagttcatcctaaattcacccagtaagtgggttgattctctgtgtggttaattggctttatctacaggaaaaacaaacctcttatctatgacaggaggtagttttgcaactgggagtgagatgccccaagaactgaggttccttccttctcacagaaactgggagacaggggcgccttctgcccggatgcctgcctttcaaagagaggtctcctatggccttgaggaggacagttctgggttggcaggcaagatgtttatgtatgctttagaaagctttacatacatcttcaagggctagagaaagaattttcaattacctcttctaaaaaataaatgctctcaaagtccagcctaggctgcatagcaagatccaatctccacacacacaataataataatcaatttgctgggcatagtggggtgtgcgtgtagtcccagctactcaggaggctaaggagggaggatcacctgagcccaggaagttaaggctgcagtaagcttggatggcaccactgcactccagcctgggtgacagagggagactctgtcaatgaatgaatgaatgaataaatgaataaatgaatgaatagaaaatgctctgagcgaaaagaggagagtctctttatctttttgcaacaggctaaacaaaatttttaaaaatgtatatttgcctcacagagattattccaggaaaagaaatggccctcagtgtcaaaggatgcaaaactaacctgtgagttcctggcaggtttagcaataaaggaggatgttgctgatctcagtacaagcaatgttagagaaaggggaagatggaagtggacgaggaccagtgagtggaaggtgacaaatggaagcaaagaaacccatccagaccattgaagatgcttgagcgagaagaaagaggcggtggagggaatggaagcccgaggaagtcatttgttgcaataggatgcctcagagcacgtgtagggtgcggggcagagcccatgcagaggggctgtggaaggctggcagggtgcaggtggccccactctccgtcaccctgaggaatatgtggtcagagttaaagctcagtctgtttctgggatcaggtaagaggtgagcgtccggagaagacaggcggatcttcagatcctgcagacctccaccgcgccctctgtccctcttgactgctttttctccatctccattgtctggctcacattcgtgtcactttttcatttctccctacccctcttttctcttttctcctctctttttcttaacccttatacctttggaagtcccactaatagaatttaaacagcttttcaagttggttttttgttcccagaaattgactttagactctccatgaataatgtggaaatcaaacgagtataagctgattcacgtctctgcaaatgaacaaataaagtctacattccaatgctttctttttccagagtagcccacatttgatttttttttttttaattactgtcacttgcaatagatttttaaatcttgtaacctggttacacaaataccatggggccaaagacttacttcctgtaagaggaaaccaggcttgactagcctcatgctggctttgaagaagtaaaatcaggggttgatgaatttgcatagggtaaatatcaaagatcgaaagtcaacaataggtggtagagggaataccccaaattataaaaaaagaaactgtttaagccacaatagaattatcgtagaaataaaccatggtccttcctgctaaaatattccacttagaattgtaaaatattcttctcaataactcctgaaagagcctattaagaaattaatgaggctgggcatggtggctcacacctctaattccagcacttttggaggctgagacgggtggatcacttgaggttaggagtttgagaccagcctggccaatatggtgaaaccccgtctcaactaaaaatacaaaaattacccaggcatggtggcaggcacttgtaatcccaactactcgggaggctgaggcaagagaattgcttgaacccaggaagtggaggttgcagtgagccaagatggcagcactgcactccatcctggatgacagagttaaactccatctcaaccaaaaaaaaaaaaagaaaaagaaaagaaactaacaaatgtaagagtgtctatgttccaaatccggtgtattattttatgcagcctttcacaagctctaaaagattcactgtgcagaactggaggttctagagaaagaccacgcctcctcctacaggtaactcttgattcaggaagcagctcttggcttatccctgggcttagtggaattcaaatacctgaccataggacaccaagggctttgggacctgaaaggcacatcatgtcctggtgacatctgagttacctggggcatgcacagccagcctccagcatcccagggagagctgtgtatggggtcaggctcaagcaggtcccagggcaccagtgacccaatgggtgactcagactcccatggcacctgctccttctgtttctccctccaccatatatatgagctcatgggaaacactgtgtgacctcttacagaggaggaaagtgcatggacttccagtttctagaactgtgatacaataaactcctgttgcttatctactcctctacagtattttgtcatggcagccctagcaaactactacagggactgtgagggttaagatgacaccaaacatcaaatgccactccctgttccaacactgagaccattccacagcctctgaatgacaagacaggccttcaaaatcaagaccacctggctaggtaagaagtactttagtcacaccacttctgaactttctcgcctacctgcagggcaggaatttttaccattttcaaatgaggacactgaagcccagagaagtagtgctatttcctgatggataagaggtgatatatttcagtcctcagaccaactctgaagtagcaagcttctagtcttaagagtcaaacttggctgggcatgatggttcaagcctgtaatcccagcaatttggtaggccgaggcgggtggatcacctgaggtcaggagttcgagaccagcctggccaacatggtgaaaccctgtctctactaaaaatacaaaatttagccgggtgtggtggtgtgtgcctgtaatcccagctacttgggaggctgaggcaggagaatcacttgaacccaggaggcagaagttgcagtgagctgagattgtgccattgcactccagcctgggggacaagagcgagacttcatctcaaaaaaaaaaaaaaaaaaaaaaaagagaatcaaccttgagccaggcacggtggctcatgcctgtaatctcagcactttgggatgccgatgaagtcaggagtttgagaccagctgggcaacatgctaataccctgtctctaccaaaaatttaaaaattagctgggtatggtggctcatgcctgtaatcccagctatttgggaggctgaggcacaaggatggcatgaacccaataggtggagcttgcagtgagccaagattgtgccattgcactccagtctggagtgcaaaaaaaaaaaaaatccatctcaaaaaacaacacaaaaagaataaatatgtggcttcatgactgtatattactgggcttctgacctagactaaaagatcagggaagagtttcctgaagagaaagtgagctatgatgggcccactgtactccagcctgggcaacgtaatgaggctctgtctcaagaaaaacatgcagaataaaaccacaaaaagataccactacagaactattagaatggctaagattaaaaagagtgaccacgccaagtgttggcaaggatgtggaggcactggaatgttcatgctgctggtgggaatgtaagatggtacaactgctatggaaagcagtctggcagcctctaaaaatttcagcatacacccaccatgcaactcggcaattccattgcattcccacattttttttagttaaaggaaaatcaagtgtaatgatctttaaagcatttttgcctgacaaatagatgaaatgtgggtagtagcccaacactccctggtcagtctatacagggcatatgtggcctcatggcccccaggaaatatggctgtttccacaagtgctgagtccactctctccatcaatcctaagatgttagttccacagcactgccagcattgggctttgtctatttctttctttgtcatttttgagagggggtctttctctgtcacccaggctgaagtgcagtgatgcaatgttggttgtaatggctcccatttcatttctaattgatcttatttggctcttctctcctcttttcttggttaatcttgccaatggtctatcaattttatttatttttcccaaaaatcagctttacattttatttatattttgtattattttgtttcaatttcatttagttctactctgatgttggttattttctttcttctgctgggtttgggtttggtgtgttcttgtttcttgagtttctagaaatgtaaccttagattgtctatttctgctctttcaggctttttgatgtaggcatttaaggctataaacttttagcatgctctttgctgtattccagagattttgatagggtgcatcactattgttcagttagaagaatttttaaatttccatcttgatttcatatttgacccaatgatcattcaggagcaagttatttaatttccatgtgtttgcatggttttgaaggttccttttggagttgatttccagttttattctactgttgtttgagagagtacttcatataattttaattttcttaaatgtattgagacttgttttgtggcctatcatgtggcctatcttgaagaaagttccatgtgctgatgaatagaatgtatattttgtggttgttgggtagaatattctgtaaatatctcttaagtctatttgctctagggcatagtttaaatccattgtttcttccttgactttctgtcttgatgacctgtctagtgctgtcagtggagtactgaagtccctcacaattattgtgttactgtctatctcatttcttaggtctagtagtaatagctatataaatttgggagctccagtgttaggtgcacatatatttaggattgtgatattttcctgttggacaagtccttttattattatataatgtccctctttgtcttttttaagtgctgttgctttaaagttagtttttttgatataagaatagttactcctgctcacttttgtggccatttgcatggggtgtctttttctacccttttaccttaagttcatgtgacactttatggttaggggagtctcttgagggcagcagatacttgcttggtgaattattatcaattctgcaattctgtatcttttaagtggagcatttaggccacttacattcaatgttagtattgagatgtgaggtactgtcccattcatcctgctatttgttgcctgaataccttggttttattcatttatttattgtatttttgttttataggtcctgtgagattcatgctcaaagaggttctgttttgatgtgtttccaggatttgtttcaagatttggagctccttttagcagttattgtagtgctggcttggtagtggcaaattctctgagcatttgtttgtctgaaaaagactgttatctttcctttatttatggactttagttttgctggatacaaaattcttgactgttaatttttttttttttttttttttttttctgagacggagtcttgctctgtcacccaggctggagtgcagtggtgggatctcagctcactgcaacctctgcctcctggattcacaccattctcctgcctcagcctcctgagtagctgggactacaggagcctgccaccaggcccggctaattgtttttgtatttttagtaaagacggggtttcaccatgttagccaggatggtctcgatctcctgaccttgtgatccgcccacctcagcctcccaaagtgctgggactacagaagtgagccaccgcgcctggcctgataattatttttttaaggaggcagcagatgggtatgcatgctcattcaggtgttcttcccttattgaagattagtaacatcacatgtgttgaaaagcatttgggattatttacttaattgatgagtactcatttatttttatgttaatttgataccacatataaacaatatattaacataggtaggggcatatacatatgtgatatgtgatacaacatagaacatatacatgtgcacataaagatagagggagacagaaacacttcagattttttattttaaaactttatgcatgaacccaaaaaactcactgttaaaaaaaagacagctggatttaaattgtgcttttgtaaatagaaaaagataacatttatctgaggaagtccttgctgagttttagagaaagtaggtagtaaatttacatctcaaagcacacacacacccccacacacacagagagagagagagagagaaggaatttgggtgtgttcaaggaagattaaaagtagatgccaaggtaacacaaaaatgatagaaatttataacagcattttataaggagaccagttttatttacatacatagcttttattttggtctctgttttccaactgtactccaggaaacacactacacaggctccctttttaagtgctggtgggccaatgcacatgcagacagcccactttaagggaagaatcaggggagaagagatgcagaccccagaattacgccaacataaaaaacctaagtcaaaggtcaaacccacacttgaaatctcatcgcctgtttcaccctgttttcagtgtactttactttctttaatttctgctctaaagcttttaaataaactttcactcttgctctaaaatttgcctatgtctcttcttctgccttatgatgcttagttgaattctttcttctgaagaagcaagaattgaggctgctgcagacttgtatagatttgctgccattaatatactttagtgccattctacatgatagaatatatatactcttatatttatacatatatatatgtaaaatatgtattcatagaggccttgaatctacattcttgctgcagtttatgtaaacaatccaggtataagactaaaacttattttggaaatacattggtcccatatgatttctgtttcataaaaatgggagacaggagggggaaaattatttttcagaagaaaacaacaaaacaacggctattaaatttgttcattttttttttaattttgttatttacctacaatttggactgaatcctaaattttttcctggctacaaatttcaaaactaatggtttcagaattttctcccatttttcttccattttggtatattataaattaaaactgtgctttttaaatttttatcttttttttattacacttttaagttctgggatacatgtgcagaacctgcaggtttgttacataggtatacacgtgccatggtgttttgctgcacccattaacccatcatctacattaggtatttctcctaatgctataactcccctggtcccccacccctcaacaggtcccagtgtgtgatattcccctccctgtgtccatgtgttctcattgttcaactcccacttatgagtgagtacatgcagtgtttggttttctgttcctgtgttagtttgctgagaatggtggtttccagcttcatccatgtccctgcaaaggatatgaactcatccttttttatggctgcattgaattccatggtgtatatgtaccacattttctttatccagtctatcattgataggcatttgggttggttccaagtctttgctattgtgaatagtgcagcaataaacatatgtgtgcatgtgtctttatagtagagtgacctataatcctttgggtatatacccagtaatgggattactgggtcaaatggtatttcttgttctagttccttgaggaatcaccacactgtctttcacaatggttgaactaatttacactcccatcaacagtgtaaaagcgttcctatttctccacatcctctccagcatctgttatttcctgaccttttaatgatcaccattctaactggcatgagatggtatctcattgtggttttgatttgcatttctctaatgaccagtgatgatgagctttttttcgtatgttttttggtcacataaatttcttattttgagaagtgtctgttcatgtgctttgcccactttttgatgggcttgtttggtttttttccttgtaaatttgtttaagtttcttgtagattctggatattagccttctgtcagatggatagattaaagcttgcaagctgaaactcaacaacttatgtaaacttctggagaaatcacagcaacttacatataaacaacccttgtgcctgctgatgtgtggactacagaaaaggtacacatgaacactgtattcagactgcaatttagagaaatgtgtcagattaccactgcaattggaagatgcttcagaaactctagaaaacctagtctatagactgctccagacattacaggtgagccaagatacaactgaaagggttagagtggtgtttgctaaacgaattgctctaattgaagcagcagttgtgtgactttaataaggttccaggattatactgtccctttgttgctgtgacttccctttgcccttttctgatttgtctttatcccttttccatgggacatgacttcttaagaatgagccttcctagtgatgcaggatcagatgaaacttacagtcacaaagtcatgtcttctacaatgttttgtctgaaagcttttgaagaattggggggccagctgtgctggcacaggcctgtaatcccagcacgttgagagtccaaggcaggaggatcacttgaaaccaggagtttaagaccagcctgagcaacaaagggagaccatgtctctgcaaaacataaaataaatcaaattagccaggtgcagttgtgcatgcttctagtctcagatacttgggaggctaaggcgggaggaccgcttcagcccaggagttcaaggctgtagtgagtacactccagtctgggtgacagagcaaggttgtgtctctaaaagaaaaaaaaaaaaagaaaagaaaaagaaaaagaacggggtaaacaggaaagccaaaaatcttgggcatctccagatgattgcctgaacgaattgttttttcttggcttcaaaacctttcaagatgtatatatctttgtaaaagaaagacatgccaattgtaactttaagtgagcaatcaaaatctagctcctaaaactgaagtattttaactctcattctgataatatttattttctgaggcacagaagaaagacaagattagattaattgtttttctgcccactccatctcttccgacctgccttctcccctttaatcaaatgtataaatactaagcctcctgaaatctcttcagagaaaacacaagccacagagattttttgcaactcatgttttcccagggttcactctcaagctctggctcaataaaactcaattggtcaagacccttgcctcagtcagtctttctggatatccaccatgagtcctgcaaagcccttcagtaatctattgcctgcctaggtgatgtgtacccaggtgagtcaggtcttcatgagtcaaacactcgtcttccttttctgtctttcccaaccctaccactcagtgctgtgtgctctgatctgaccccagctcccaggttgtttgtattggtctaagaaagcaagaccaggaggggcaggttgagaaggaagtaagaggccaacagccatggaaagtggcacgtggggctgtcattcctcaaaaccacataccctgggtgcattttgtgaatttttctggattcagaatcttttccctgtgtgtctatctagaaaatcaccctcctcctactttcctctcattacactttctgtttctggtgcaatcgtttatgtccagagaatggccatgcaaatagttgacaatagaataaaaaatgactttttgtgagatttggaacctggcctttcttttttccaaaagagattgaggtttctaaaagctagcttttatgcagggctgtgcagttgtgagtgtagttttagggaacaggtgcataagtgaagggtgagacagaaaacaaaatgctggctgtttgtcaaatcctgaaaataatttttgaaggtggatgtcattcaggagaccttgtaaatcttagagtgtcctcttaccagatgaagtggaggatgaggttgaattatggagttaggtgacagtgggtacatacttctctgcctcagtttttttttttaatctgtaaaaatggggatggaggcacttgggattttttgtgaggagtgtagttacctggaaagctcttacgatagtgcctcgtgcatagtgagtgctgcattagtgtgagctattataattatgggaatagacaaaggtgccaccctggccatccagagtggggaggtattttccagtcagggtccaggcaggccagctggagatgaagctgattagtggggaagcttaacttccaggagtggaagaatttaggaggagtaaacagaatgcacaacattctgtaaacatgcctttacccaacagtaggaatactcagagtgggtgtgtcttccgtggcaatcattatctcctgggaatctaagaatgtgtcctagagtcaaatggctttgatgtaagccaaacccagaaatggacttcagggctgcctggcacatagcattcattcatcttgaaaaaggaaagcattcatcttgctaaaggaatcccctcttctggcccaggccattatttttgtttttgtactatcctaatttttaagatgtaaggagaaagaccgaagaataaaataatgaggtacatgtatgaaataacagggtagaattgagactggtacgtgtaagttaagagaaattgtgtataaattttgtgtgaacagaaaaaggatttcttgttgcaaacagacctctccatataaataatacccattgccttgagtggatagcagacggcatcacaagaatattccagcagagtcatgagagaatgggtagtgtggcttctttaattggcaggttagactgagtaagttactgaagagaaaggagttgaaggagaagatgggtgagggcaagaaaaatgggaaggtgaaaggaaaggactgaaaggaatgtttaccaagggctcatcaggtaccaggctctgtgactaatgtctcacacatgttaatttactcttccactgtcattttctgatgcagtaagagtcagccttacactgcagaagaggaaagaggctgagggaggtcaaatgagtggcccagggtcatccagccacttcatagcagagctagtgtgtttcactgtggtttgtgcagacagaaaagtgagacatggaaggaaggcaaaacatttttgctgtgggtgatgtttatgaaagtgacctgtatgaggcagaataatggcctcttaaaaatgtccacatccgggccaggcgcggtggctcacgcctgtaatcccagcactttgggaggctgagaagggcagatcacgaggtcaccagttcgagatcagcctgaccaacatggtgaaaccccgtttctactaaaatgcaaaaactagctgggcgtggtgtcgggtgcctgtaatgccagctacttgggaggctgaggcaggagaatcattgaacctgcgaggctgagattgtagcgagccaagattgtgccactgcactccagctggggcaacatgagtgaaactctgtctcaaaaaaaaaaaaaatccacatcctaactgttggaacacatgcctttacttttcttggcaaaaacactgttcaaaggtgatgaagttgagtatcttgagatggaaaccttattctggcttatctgtgtggctcccagtgtcatcataagggtcctcttagtgaaagagaaaggcaggagggtcagggtgagaatgatgcagcctgagagactccactggccattgcttgctgtgaacatgtgtgataagacaaaattacaacgaatttagtaatagatgtaattggcttttatttgtgatttatgatttgaggcagctctccctctacagatgcctcagcatcccaagtagctgggactatattgctggatctggccagcagcctgcaatgcaacagggctctttctttgttcccaggcagatcggcaggttgagaaataaaagacacaaacaagatagtgaaagctgggtccaggggggtcaccgccttctgatcctgcgatgctgccaatgcactggatataccagcatttattattaagtttagtgagagtgttggtaggttagtgagggatttagggtcatttatatgctctctataagggtcacattccattcccagagctatggacatctgcttttctgggataggaatcttggttatgtgaaacctccctgactgcatgtccgttcataggctctctgcagggggaagcacatcacgtgctgttggctcattctggcagtccaaccttgcatttgtcttttcacaatcctgcatgcaattttgtgtttacaataatcaggtgcatttcatcttttattccatagcaatagtttcagggggtctccctacatctcccccttttctctgatttcaatgaaccatagcaatcatagcttggcactgatcacgattggattgaagaatattttttccaattttacacatgaacagtaaaccaatagcacaaattatacacagaacaaaattaatgatagtggatcctcccaaagattttacctattgaatggggttgagattagataacccctcagagatactgtctaaaacttcagcactgggtaaagcagttaagtgtgcttgagaggcttcaaaaatctgttctttcagcttgcttatgtctaaacttaatttatattcacttccttgtaaatgggattttactgattcccaattgtgaaaagactcattatattggaacagagttatacaaaaatcagaagtattccaatcacgttgcatttgtaatctatgttctaaactcataattctgtctcccatccatataacagaagcacatcccatgctgtaggcacattctggcagcccaacctggcattgtctttacacaatcctgcatgcaattttgtgtttacaataatcaggagcatttcatcttttattccatagtgatagtttcagggggtctccctacaggactacaggtgcacgccaccatgcccggctaatttttgtatttttagtagagacagggtttcactatattgaccaggctggtctcgaactcctgaccttgtgatctgcctgccttggcctcccaaagtgctgggattacagatgtaagccactgcgcccagcccataaatcaaacatttctttgagtttttgtaattccagcccaagagaaaccatttgatatttgaagaatggctgcacacaaacatttgcacacaaataaaaacatctgtagattgcaccacacgagggagaataccagtatgactatcaggaggaaaatatcaagagtttgaaatatgcaccttaggcaagatgcaaaccaactacaataggatagatcaaagaagaagccagaagagtctagtcattttaaccaggcagcacatttattgatttttacaactgagtctctataacaccggatgtatttatctatgtgcaacaagaagggccagaaactgcacaggctcccaaatgttcagctggtagagagcaattctattatctagcattgcatgtctatgttaaattaaaacagggagtgagaatagggaagtatagaagtggaagcctaaaaaaaactccatatatttgaggaaaaagttgtgttacagatgcagctaacgtcagcctttgggtggattaaaggatctcttggtatgtaaaaatgtgtgggccaggtgcggtggctcaggcctgtaatcccagtactttgagaggctgaggcgtacggatcacctgaggtcgggagtttgagaccagcctgaccaacatgaagacaccctgtctctactgaaaatacaaaattagctgggcgtgttggtgcatgcctgtaatcccagtactcgggaggctgaagcaggagaatcacttgaacacaggaggcggaggttgcggtgagccaagattgtgccattgcactccagcatgggcaacaagagcgaaactccatcttataaaaaaaaaaaaaagtgtggttgacatgatatatctgacactgttaacttactctcagaggctacttcttgtgaaatcctaagtacagcattattctgggaagcaaaggagacaagcattagcaaggacaaattcagagaggtaagagtctcatcatgagtgataatcttgttctgacatcttgagaaaagctgtccgcagtataaagtcatcaacttgttgtcatggtttgcagtttgagtgtctctaagttatggtgttgaacatttcgtgagctcttagtggcccacacctcagacatgagggttttcccatgaagtttacattgaattgtccacctccaacttatatggcttcaggaacagagccgctcttgttcttaatgatttcattggagaaaattgaattggaagaactaaaagaattcagggtccagtccagtctaccagtggattataaatactcagagataatgaacagtggttcaatctggtaacaggtgtactacagtttttcttttcaacatagtttttctgtctataggagtctctatttttaccaaagataattccagtaggatgaatttgtttgcaaaataggttgagtctcaccgaacttgcccagattttttagctaagtgcggaaagagtagcaatggacaatagaggctctttttaaacttctctttgctagaagtttttaataagaatctcagattaaacttccaaaaacctcttgaaactaggaagccaaaccaaggcccacttcagactttgcctgcattccctatgggtttattctatatatattctcaaatataacatcgcagtcaaagccttggtaatataaccaatgttttcaaatgtgtcctgttataaagagagcagatccttactgaacttgtgcagataactttattaccataaacatatgaatactcatgaatagtttcccaattctggggcactcagatagagagcaaaagcaaatgtttcaatttttgtttacaaaagtatactttaccaattgctcaagaaaaaaagttcataaatctggagaataaaacattcaaagaatcagcacattttcaaatagaaaattatgaaaacattatgcttttgattatttagtccaataacatggagtttttttcttctttgtctagaatttcatgaaggtatcagcctgttcattaaaattttgaaagttcttagtccagtggtatgatcttgaagttatcaggaacttgtattcaagagtccttgtcagagtcttttccataaatctccttgaagaaaaagcaattttggactgtaggtgattgtaagtagtttgaggaagaatcaaagcaactgtctgggaaagacaaagatttaaactgactatggttaaaaatctaatgagaatttattatggtaaagacacagctcacatagaaatccagttacttctgtggcatatgacactatggtaacatatttgatttccagaaatttcatataatttttagaatactcatttaaaaaaatttttttttttgaaatggagtctcactctgtcacccaggctggagtgcagtgatgcgatctcagttcactgcaagctctgcctcccgggttcatgccattctcctgcctcagcctcctgagtaactgggactacaggtgcctgccaccacgcccggcaaattttgtttttgcatttttagtagagacggggtttcaccgtgttagccaggatggtctcgatctcctgacatcgtgatgtgcccacctcggcctcccaaactgctgggattgcaggcgtgagccatcgcgcccagcgtagaatactcatattattaacattcccataaatattatttagagaaggtttagcctcacttatcctttatttgaaaatgttttctacacaatttaatatatcaaataaggtggcttttccattcagcttctgtttctcaagaggattactgagttcttggtgtagcccattcataaatagggccaaaaatgtatagtcttatgtatgttgaaaaaggtccttaggtaattccagtacttctagctgaaaatcattcatttagttttaagttctacctattacaacaagagttctccatccttgttacatgttagtagtgtcagggaagacttaaaaattaccaatgccttggtccctctccagacctttaaactggaactaatgggtggggcttgagcatccacttttaaaaatgctttccagtgattccaatgtgtagctctatttcccatcagatttctctgatttcttgtggcattcaattttttctattttggtatcatgattattttcaggtctcatttcctgtcttaggctttatgtctcctggggtagggaccttgccttcttcatttctgtatgttttttgaacacatgaactggtcatcaggaaaagatctcaaccacacataggttgtgttctgagtctcaggttcacatgttaatcctaaagtctccgttctccatgaggtcagatgttgcctgtgatgaagggtgtcgttaagtctgcagtgcagatggtggaggggatttcactctgtttttagacatagcattggaactaagaattttatgtctatatgggtgaaggggcagggatgtgtaggaagacagttctaattaggatgaaggaattatactaggaagtagaggtaaaggaagtgagaaggcttactaaatagaagaaatgtgaacttatcaaataggctagagtagacccctgcagattcttgattaagtgaattaactagattttagaaaggtaatgaggcagtcatatgcaaggaaggtttcaaagtctggccacaagaagtcaagcaatactttgagaagtggttgagctttatgggagtgtagagaattacactattgagagatgttaaaaataatgaagagggtttcaccatgtgaaattgtgtttctcatttgaatctgagaaacaaatgagcagaggctggagataattatgtctaaaagacagtggggtacagggagcataaaggccagggagaaagggaactgcaggaattagttctgagaagcaggagtttagtggaggaaggaggagatgcagtcccagatacaagcaaataagtcttttccctctcccaagcatggcagtcagccctgcaggaaccaggataagagaaaaggccatcatacctgccagtcttcctgaaatacagaaatgacttcacggctgctatattggattaaggagaggaagacgtcctattcctgaaggagctgtcatggaaagaaaagtaaagaaggaatgaaggtgatgttattttacatgggggagcctcaggaagaggcatgtagcatgaggtactctataattgtttcttcaagtactacattattcctcttgggaaattgatgggagatgattatattcttgcagttttttttttccctctcaccatgtttctaggatggtgatcagtcctctgtcaaatctctactgcactcagatattttggaaggctttcagacataagaaaggctgattgctattttctatgtcattagaacttaccaccttttcaccttttcatggttgcatctttttctcagtctctctgttgtggcagccatgaatgagactctgtcaggtctccatggcagggagctgattgacagaaggcccacgtccgtgcatttcacattcatcacctcctttgcacagaaagcttctttcccacaggctcccaggaagggcgtgaaagcaagcctagttctctgaggctctctttaactctaaagggtgactggttggaggactccccctcagccttgcaaaaactcttagaactgcattggtacctaaaacttctttctctttctttttcacaggaatcagctctgcatagtggtctgtgggttctcccatactgccttcatgtctgccccacattccctcacaggtgtcctccctgataaattatcttgtatgtctaatcccatcttgggtgcatctcagttggtaaaaactaacatatcaggcttgattctttgcacttagctttttttccttctctcccacaagtagtcagtaaccatgtcctagtgttttatgtgttacctctttttccatatatatggaaaaaggtaggtactgttgaggggcatttcctatgtgccaggccctgtgctaaatactttacctgtatctcatttaatccacacaataaccctgtcaggtagaaattatttccactttgctgatgaaaagacagaagcttatcatggtgtaaaaactttcctggtgtcatatggctagtgacaggtggatctgaaatttgattctaggactatttgacctcaaggctaatgatgatggtagtaatatagcagctgacattggctcctctgtgtggcatcttgtttcattgattgcattaaacatttaaaagaatggtatgaagaaagcactctcattgcaattttcaggtgaggaatcagaggttcagagaagttgagtcttgtgcaagaaatttataactgtaaactcttacattaaaaaagaagaaagatctcaggtcaacaacctactttaatacttcaggatatgaaagaagaacaaactaaacccaagcacagtgaatgagggaaataataaggattagagtggacataaataaaatggagaatggaaaaagaatagaggaaattaatgaaaccaaaagttgattcttcaaaataaaatcaacaaaattgacaaccattaactagattgactaagaaaaaaagagaaaagtttaaaattactcaaatcagaaatgaaaatggactctgagcatggtgggtcatgttttaatcctagcactttgggaggtcacagcagaaggatttcttgagaccaggtgtttggaccagcatgggtaacctggggagatgctgtctctacaaaaatataaaaaaccaattaactgggcatgttgacatgaacctgtagtcatagcatcttgggaggctgaagaaggagaattgcttgagcccaggaggttaaggctgcagtgagccataatcacaccactgtattccatcctggactggtctacatagtgagagcccgtccctctcttcaaaaaaaaaaaaaaagaaaaagaaagaaagaaaaatgaagcgattactaccaattctaataaaataatgattatgaaagtactataaataattttatgcaaataaattggataacctagatgaaatagacaaactcctagaaacacacaaaaatatgaatagaactataatcagtaataagattgaatcaataaaagcatttgatgaaattcaatattttttcataatgaaaacatcctaagaatagaaggaaaccacctcaacataaaggcaatatgtgaaaaacccaatgctagcatcatactcaacggagaaagactgaaagctttccctgtatgagcaggaacaagacaaggatgcctgcttttgacacttttattcaacatagtattgaaaggtctagtcagaaaaattaggcaagaattgaaaaaaagacattcaaattggaaggaaggagtaaaattctttctgtttacagataacttgaacttatatgtagaaaatcctaaaggtggaacaaaccaattaaaattaataaattcagtaatgttgcacaatacaaaatcaacattcaaacatcagttgtatttcaatacactaaacatgaacaatctgaagggaaattaagaaaaataatttcaatttatattaacatcaaaaagaataaaatatttaggaataagtttaaccaaagaggtgaaataattatacctgaaatctacaaaatattgctgaaagaaatgaaagaagacatcaataaattgaaagacattttgtgttcatgaattggaagactcaatattgttaggaggacagtgctgcccaaagtgagctgcagattcaataaaattcctgtcagaatctcagtgacatttttgcagaaaaagacaaatctgtcctaaaatttatattgcatctcatgactctaaatagacacatagctttgaagaggaagaatgaagctggaggactcacacttcctgatttcagcatttactacaaagccctagtaatcaatacagtgtggtactggcataaaggaggacatagaaattaatgaaatatcatagcccagaaagaaatgcttgcatatatggccaaatgattttcatggagtgttccaagatcattcaatggggaacggacagtgttctcaccaaatgatattgggaaagctggatatccaagggcaagagagtggaacctttacctaacaccatgcataaaaattaacccacaatagatcaaagatctaaatgtaagagtaaaaactacagaactcttagaagaaaagcttcatgatactggatttcacaatgatttcttggttgtaacaacaaaagcataggcaacaaataaaatggattaattggacttcacaaaaatcaaaaccttttatatatcaaagaacattatcaagaaagtaaaaaggcaacctatgaaatgataaaaatatttgcaaattatatgtgtgataagaaattaatttccagaatacatgaaaagctacaagtcaacaacagcaaacatccaaaaacccaattaaaaaatgaacaaaggattaaaatggagttttctccaaggaagatatacaaatatccaataagcccatgcaaagttcctcagcatcacgaatacttagagatatgcaaatcaaaaccacaatgttacaccacctcacacactttaggatggctttgataaacaacaaaaatgacagcaacacaaaacaacaggtgttttcaagtagatggaaaaattggagctctagtgcattgctgatgggaatgggaaatgttatagccactgtaaaaagtggtgtggctgtttctcaaaaaattaaacaataacttaccatttgatccagcaattccacttctggacaaactccccatagaaatgaaaaaaaattgaacaaatatttgtacactgatgttcagagaagcattactcacactagcgaaaaaatggaaacaactgaaaagtccattgaaagataagtgggtaggcaaatgaggtgtatctacaattaaaatgttattcaaccttaacaaggaataaaattccaatacatcgtgcaaaatggatgaaccttaaagatattatgctaactgaaataaaccagacacaaaaggataattatcatataattccatttataaaagatagttagaatagccagttacatagagacagaatgtagaatggtgtgtgctaagggttatggggagaaggagtgagttactgtttattgggtacagaggtttaatatggtaagaggaaaaagttctggaaatggatagtgtgatggttacacaacactaaattgcacacatagaaatagttaatggtaagtcttatattagatatatataaagtgtctggtagtcttaccctctctataattacacactttttggcactgcccctttcctgccatgcagagccccaggggtgaatctctctatttctccagctctgcatcagtcactatcctccgtgctgtgtcccacatgctgtgcccacaacctcatacaaccggtgacttcagagccaggacgcaacgcaggagtcttccctgaggctccctctcttcttatttccctgcagcctggcccgggggaggcttggcttcaactggcagctcgatttagccaaattcaggacaggccaccaggactctttctccacacatgctggtcccaccccaggttgagtgaggcaggcccagtcaccagagaagcatggagcagagcaggaagcagagtctgagctgctcctccctcacccaaggggcttcctcgtctcatttgggggaaaagtgtgagcttgtttcagagcctcagatgttccttgtagctcatggaataggtacaaggaaacaaagacatggcagaaggggatgtgttggtgacatcgagaagcaacttgatcttgaggactctccttctcatccctctgtgaagcctcctctaccacatagggctcagggctgataaagccccctccctaactttcttaggccagacacaaggtcagccatgagaaaacagaaaaacaaggagaagagagtttgtagagacaaattggaagggttcaggaggagaatttgggatttgcttgtgcccatgggacacaggctgggaataaaaatgttttcctaactcttctctgaaagccaggtagactccacctaaaaccctattgccaaggatgctgggatccacttaccagagacttcgactgtcatggatttggagctttccttgccagtagctgagttacgaacagagcaagtatagagccctctatgctttgtagtaatttgggggatagagagcttttgtcctgattgctgaaacttcccattaattgtccaaaaatactctgccggtgggttagattccgcgaagcaggacaagtagaggttttctcctgaacggtaataggtgaatgaagggtaaatgctggggaggtctggaccatctggagcaaagagaatgaagccacaggtgatgtcatccaagggaaggggatgctcctggtctcttaaagggacacagtgaccctctgagccaagacacaccctcaagtcccagccgaacccccactatattcactgagccaaagcctgaggtattcacctgtttctcccatcacaagctattgacacaaagtctcccatgacaagagcgccccctccccttatattcctggttaaggctgtgcctacctaggttttccaagggcagggagtcatggccagctcagatgtccagaaataaaggtgtctatacttggaccggagaaagactgagaggactggcttgtggtcatttagatttaagctggtgtcctggcccacagaggaacaaaagatactcacagaggacattcagggtgactgggtcactgcgcatgccaccatctcggtcccgtatttcacattcatagggtcctgtttcatttctcgtgacactgggtagaatgaggatcctgttttcaatgggtcgctttaccctgggactgaccgggaggctctgaccatttagccaccaaatgtaggtgtagttctcactcttaggttcacaggtgaaggctaagacatccttattctccctgggttttgagttgttgatggtgatgtagggcttgggcagcttcactgtgtggataacagagagaagattgtcctgtgtggcacctttgattcctccacaggcatccttcaatcagagttggcatctcccacctgtcaacccaccagagtccttgaaagccagtagctgatgcatgtgtcacaagatagatgcatgatgatctaagggctcaaagactgtgaggccacctgctctgttttagggaagcacagactttctcaagtgtcaattgagcagcagtgttgggtcatgaacagacacatcagtgggagtcacagcccctggtacccctcccagtccctccataatcagttgactggctggctcaccctgggttccttacctggaatgtgcaactgctgggccccttccaaattccatcctactttgtccccctatatgtgatttctctgcagctcccatttccaaggacattctagagatgagtaataatgggacttcccattgtcctgaaaccctgaagatactgagcagtctggcctgggactggatgtttcagcagaaataacacaggagagaccagagtcaagcctggaggtcagttcagtcatcagccagtggaggcagaaagtggggcagtgttttgcaggtgtttcatgatgacttacttgaaccagtgacctctaaagatagagcagagtgcaaggaatgatctagaaggagtcaaggggacaggcaagagctggtggctttggagcagaaccatgttccctgtcctgggttctttaagtttcctctccttctgcagagggcaggtgaggaccatgtggatctttccagaaatacatgtggatgtttgcaaatgcagaactgattggtagaaagggtgggaatgaactgctggaaatctggtcctcatggaccatgtgtgtttgatggatatgagacaaatttgaagagaagttttgggaatattttctttcactggacattctactctctgattccatggattcgactactctagggacctcatgtaagtggattccagagtgaatatgagaagagactgctgtttgccaggagctgggagtggggagaatcagaagttgttcatgggtgtgcagtttcagttatgcaaggtggggaggttatagagattggctgtcgagcttgatacctatagttcacacagattgagtatttcttatgcataagacttaggacaaaaagtgttttggatttctgacattttttgattctgaaatatttgtcatatacttactggtttagcatcccaaatctgaaagattcaaaatctaaaatgctccagtgagcatttcttttcagcatcagattagtgggcaaaagtgggaggtgataagccaaatatattcctgcccttttttttttttatctcaccacgtttctaccatggtgattagtttttggtcaattccacactggccattctgcactcatatatttttgaaggcttttggatgtgagaaaggctgattgctgtcttctatgtcatgagaactttaaacattttcatggttgcatctttttctcagtgtttgtgttgtggcagtcattaataagagcctgtcaggtcagatttaagacagagttttctaattctgcaaaaaatgttactgggattctggtaggagttgcactgtatctgcaacttgctttgggtagtattgtctttctaacagtattgattcttccaatccttgaaaatgaaatgtctttccatatattgatatcatctttaatttctttcagcaatgttttgtagttttcagggtataatcatttgacctttttggttaaacttattccaaaatattttattccttctgatgttaacgtgaattgaaattcttttctcaatttcctttcagattgttcattgttagtgtatagcctaaagaatgatctagaaagagtgaaggggaaaggcaaaagctggtggttttggagcagaaacatactccctgtgctgggtttttgattttccctctccctttgcagagggcaggtggctcttccctgatagctagatagacttcactggaaaacatattgccaatgctccagggatccacttaccagggactatgatcctcttgattatgagatttgttccatcagtggctgagttatggatgaaacagacatagatccctctatgttttggtgatttggggaataaagcacacttgtgctgattgctggaacttcccatcaatcagccaagaatgctctgccagtgggtgagagtctgtgaggcaggagagattggggacttcccctgtatggtaataggtgtatgaggaagaaatggtgggggcatccaggccatctggagcaaagagaataaagtcacaggtgacattgtcagagggaagggaaaatcctggtctgtggaagggccacagtgaccctgtgagccaagtcgcaacactgaagtcccagccaaatccccgctgtgttcactgatctggagcctgagacattcacctgtttctcccatcacaagctgtggaacctgagtctcccatgacaggagcagcctcttttctcctattgtggatcaagcctaggcctactctgttttgcctggggcagaaagtcatggccagctttgatgtccaggggtaaaggtctctgtacttggacctgagagggactgagaggcctggcctctggccatgtgtatttgggatggcagcctggctcacagaggaacagaggatactcacggaggagattcagggtgactgggtcactgtggctggcactcactgggttccgtatttcacattcatagggtcctgcaatatactttgtgacaccaaatataaagagggtcctgttggttttggacagctgcaacctgtgagtcatagggaggctctgaccattcatccaccacaggtagcttgtgtctgaagccgcaggatcacaggttaagatcacagcctccatggcctccctggggtttaagttgctactggagatggagggcttgggagtttccactttgcagaaaacagagagaagattgccctgtgtggcacctttgattcctccaaaggcacttttcaatcagagttggcatttcccacctgtcagcccacccaagtccttaaaagcccatggcaggtgtgtgtgttacaagacagatgcatggcaatctgagagctcagagattgtgaggctgcctgctttatgtgggagaagtacaggctttctcaagtgtgaattgagcagcagcattgggtcatggaaagacacaggaccagcagtcacagacccgatgcctctctgagttcctccgactaaaactgcctgcctgacccaccttgtggtcctcacttggagtatgcagtgctggaatcttcttagtttcagtcttactttgtcccccgaggtatgttttctctgcagcttcccttgccaaggacatcctagagatggatgatggaacttcccattgtccttaaaccctttgggtactggaaagcctggcctgggactgggtacttcagcataaataacacaggggagaccagagtcaagcctggaggtcagttcagtcatcaggcagtggagccacaaggtggcgcagttttcccaggtgtctcatagtgactgacttgagccagtgacttctaaagatagagcagagtccaaggaatgacctacaaagagtgaaggggacaggcaagagctgatagctttggaccaagaccattgttccctgttctgggtccatgatgcttccttccccttgtagagggcaggtgaggaccatgtggatcttctagaaatacatgtggatgtttgcaaatgcagcactgactgttggaaagggtaatcatgaactgatgatggaagtctggccctcatggaccatatgtgtttggtggatattagaccaatatttgggaagaagtcttgcagatactttctctcattagacattctactctctgattctgagtttgactactctatgtacctcatatcagtggattccagagtgaatcagagagtagaatagtagtttgcaggagctgggatcaggggaatagggtgttgttccatgggtgtgcggtttcagttatgcaggatgaggaggttctagagatctcctgtgcagcctcgtgcctatacttcatgcagatacagtgctccttatgcagaaagcttaaaacaaagtgttttggatttctaatttttttaattttggaatatttgcagtacatgtactggtttagcatcccaaatctgaaaaatttaaaatccacaatgcgccagtgagcacttctttttaacatcacatcagtggtcagaagggttgagttttggagcatttcagattgtggatttctggatttccgatgctcaattcgtaatactgtaattttcccataaaaagttgtcaggagtttagacctcatgttatgttctgactctagtaacaaaaaaaatttggaggaaacattaaaatgttttcataagtggaaatttttactgatgatccaaacatctaagatcaattgctggtagtagtatttctcttgagaccaaaataaggtttaggtgtgccgtgaattccagcaggatcacattatgctcaaagaaagacgccaaaggtgatttgaaattagcagctccttaagtagagagtcccgttaaaaggacagaactggtcagtgcgtcaattacataaagggaggaaggatgccaaattaaaagaagtgatgtgtgttatgttagtaaatatagaaagaactccctgcttctaatttctgtgcagagttaggaaaaatggggaggaccccaaaacaggtatgtgaaatgctttcttcattttctcttaagctcacgaaacaccactaaagtttaagtttgtgtgaattaggaagaatctaagtgagatgccaatggctcgtgtgtctccccacacgtagaactccaacttatgaaaatggcatcatcatgaggaaacagttttatgtggcacaggcagtaaaaccattagatagcacacacctggccacctccaactggtccccaaaaccaccaatattcacattacgtgtatctgacagcctttgcagttgtccacaactacaaaatttaaaaattgctattgccaaaacaaaatattaaatgtgaagttgaatgtgttgttccactttttttcccccactcttattgaactttcctttttcagttttggaagtttctattgacacatcctcaagccagagattctttccccagctgtgtgcagtctaccagtaagcatcaaaagcattcttcatttctctaacagcatttttttttctgagacagagtctctctctttcacccaggctggagtgcagtggcatgatctcagctcactgcaagctccacctcctgggctcacggcattctcctggctcagcctaccaagtagctgggactacaggcatccgccaccacgcccagctaattttttgtatttttagtagagacggagtttcaacatgttagccaggatggtctccatcttctgaccttgtgcccgcctcggcctcccaaagtcctgggattataggcatgagccactgtgcccagccatctctgagggattttaatgagttgttgacttttgagtttgttcaactttttacttactgttagaaccgagtgacaaatttcaagcttgttatatgcctgacaggaagccagaagtctctaagaagtgacaggagaatgtgagctccatagtagtttgaggatggagtcacgagtgaaacagttgaaatgagtccatgggcattggggactgcaggcctgtccagcctctgacaccctggtgagtcagtccatacattacaacagtgacagcaaagtagcatgtctgactccatctggcatctagtctctggctggctatcctcactcattcctgggcataggccaggctaaccttgggaggaatttaatttatggtttgactttgaagcaagaatcacaaaacttcctccatgaaactaacaaccttactttgcccagggatggcctttgtcaaactagtgaaagaccatgagattaagattataggagggaactgaattctgctaaaatgttggcacagtttctataattcctgactgctgcaatgttgtttggccagagtttacaaaatttgtaactaattgctcctatagataacatcactattgtagaacatgagattggtcttttgagatgtttctcattcttttgcattctggcaaccggctgacctcattcatacctatgactaatggctcagccagtcatgtggtccctacctggaggcagattcgagcacaaacagatcatttccctctgcccacatgattccatcaccaaataatcagcagtactcattttttagtcctgtgcccctgaaactatccttgaaaatctctaacccctgatccactggggaggctgatttgagtaataataaacctctgtcctcctgtttggcagacttggagtcgttaaaatctttcttgactagaaaccaacatttcaataattttttttttttttttttgtgcaggaggccagaagatcttgcctggcaattatgaatggatggaggaactgcctatccctgtcccattgtcttgtccacaggtcagcctcacaaagggaaagagccctggatgggaatacagtggaagctcattctcttagtgacctgggaacattggctcgagatgaagcctggcaggagtggcaactccaggtgatttctgcacctttcctatttcctgggaggtgggccaggccacagtgttagcgggaagggaacagaacagccagcctagttagagggagtgtctggggaaggcctaggggtgggggaagaagctgtgcaggacagggcttgccagtcagaatgaagtgggaggaagatgagggacacagagaagcagaggcagagacaccatggcagtgagcagtgagggagacactgacttcagagaccccagggaccagctgcccccagttccacagtccaggacaaaggagccctgagaatcctctggtggccaaagagcttcagagttgcatgaggtggggtggctttaggggcaagaggtagtggggggatgaaacatggatgtcagcctctgaaggacaagggacaggtgtggctagaacctcctaggattctgcatccaacatccagtctctaaagaggttttggatcattcatttcttcattccattccttcatttgttatgtgagagctcctgagtgtgtgtctctcgctgggcctgtgctggagcagggtctgagtggggaaagaaaacaaagtcctctccttgatcctttcatgacagtgacatgggcactttgggaaacacaggatttcaggttcagtgatgggggttaagatctgagggggaggcctggacatattttttgcactgactctgacggttgaggcagttgatttagttctggagtgcagactaatcagctgaccatttgctctcactcctctgaggtttagaagcctaagaagagaggatttgagccaataaatgactatggggtccttggaacccagtaagccctcacttctggtggagaagatgggcctgtggctgcagacagacctcatgtgaccctgatctccccctttgggtttgtgtgactctggttcagtgactgtgccttcctgtgcctcagttttctctcaatcaaataagctaagtggcaaatggactgtggattttcatgctactgtgaataaatgttaaatgattcagtcacctgacctaatgcttggcacagtggaggtttcacacaaacagcatttattattaatttgcttccatgagaaagcacctttacgtcagatccctgtggacaagctgctaccaggtacatcttctcccttctgtttatgcttctggggacattagactttctatggactgtcctaagcctcctaaagcagttggctgatgtcctacaaagcttgtctttctgtcctctccactctgagtgtcaggtgaagaaagctctgtctttgcccagatgaggctctgagggctgagccctggctggtgagcagctccaggagacacagtcctcagacagctggtaaattcttggtcccagtaaggcctgcccaataagccacaacccagcactggcacaggctcctcagcttaactggagcaaggatttagggacagaggtctggggttgaggcttctagggctgagcttctctgagggtctcagggggcccctcaggccaaagccctactcagttctccagggtctttctcagggtcaaatttatgaagagggcatgaggtgcttggctgagactgatctcctcctgctgagtccccccatcagactgtccttcctctgcagcgagtgtctgcagggtctggatgcgggaaaggaattctgatctgttgaaatttgtctcctctgtgtgtgtcctgcactaaatgcccaaaccgcagcatgggacataatgcagagagggacacaggcacagtgcaggcctgacaatcctgtgtgtgtgaagtagaaatgacccctgtcccccaacacccagggatcatgtggaatcactcacggtataagttgaaggtgaaatatccagttactcctctagtcctatcacctcgctttatgatgtgtaaggtgtaggatcctgcgtcttcccgggtgacattctggatcagcagggatgcattggaatatactgtttctcgtccagtgtatgcaggcccatatatatttatttgaccgtctactacatatgatgtaatgtaatggtagaggtccatcagttgtcctttgtaccagatgtagccagcaagattctgaggcaaattgtggacaagtagaagaacatccttcccctcggaaactttgggtggcagggcttcaatcgtgacttgagcagtgataggcaggttccagaagtttaaaagtgatgctaggaggtggagaaagcaccagtcaatattgagacctgtgtattggggtgaaaagatggagccctgggtcctgagaaggtctcttcaatcctcagccttgaagacacacacacacacaaacacacacacacacaaaaggtgcatgttagtttgtgtgtgtgtatgtgtgtgtgtcctactgtcctactaggtcaaggtcagcagcgtgacccctattccttcaacacttctgaccttggcatttttgtatggaatcctcttccccaggggtccacacggcacccccccccccccacactgccctcaggtcctgctcacatcagggcatccttagacttctttcctgacacgtccttcagagaccctgggtcttccctttctgacctttccctgctctgctccctccagggttcttgtcaacacctgacctcacattctagatctctttgcatgtctgtcttcctccccatgacagcgtgagctctgtgaggacagggacttttgtgatcttggttgcaccccagtgcctggaacaggctgcagactcctgcagatgtgagagttctcagggccctccacacccttggtgttttattttcccccaattgttgaggattttgctgaggacagtgtttcatgtcctgcttatacttttattagaagtgtcatctgatatagttattattatcatttttcaaaatgtcgtggccctcttaccaattccggttcaatatgactttccagttttgacctctgtccctctctggtgtattttaccctatccaggctccaacagagacttctttccttttttttcttttttcttttttttctttttatttttttgagacagagtctcgtactgtcacccaggctggcgtgcagtggtgctatctcggctcgctgcaacttctgcctcccgggttcatgtgattttcctgcctcagcctccagagtagctaggattccaagagcacaccaccatacctggttaattttttgtatttttagtagagacagggcttcactgtgttggcaggactgaccttgaactcctgatctcataatccacccacctcatcctcccaaagtgctggcttcttttattttttagaaccccatcctctccaggagacccaatccagtcactcttcttcctcctcctgtcctctcccaggaagttctctcctcacctgtgagcaggagccccttccaggtgatgtgctgtgtgcagggaggggctgagaggggccccatggtctctgcgcctgcgtgttctcctctgtggagctgagcctaggatccagaaacttcctgagcacggctgtaggctgtgctgtccttcctccttctgtgctgagcctctctccagggcaggagcacttctcaggctcatgggtggggtcaggcccaggacacctctctgtcccctcctctctcagtcctgcctccttgtccctccttctgtttttccttttgtctgtgtttcaggtccctgggaattgtggaggcctctgcatttttcagcagtgattctttcaccaaacctcaaccacactttgtgcagacacacacacacagaagagacacacacagacccacacagtcacacacataccccgcaggttgggcaagcagagtcctgggcctcagcctcctgctgtccccatggctctgggtcgggatgcacattcacgccctttgccctctttcatccccatctggctctccccttcagtgcaggaggctgaagctgcaacgggtccctgtcacagtgacaccccattgtgctgtgggtgagctgtgtgttgcctggtgagagggacccttcctttctctaatcgtgtctagcttggctgcagcttccaaggatggaccttcaggacctgggtgtcccagaggaaactgtccttcctggaggtgtgcagggtgaatctctcatgcctcttgggaggagaggcctgtgctggttgctcagtgggggctgtgagtcccagagtcaagaggacagttcttcatcactctatggctccctggggtctggcagctgagctggagctcagggtttctcatgttctccctgaccatctttgatgtcctctcttctctgcccagctgactgtcctggggtcaccacaccttccccgttgtggtgcaggaggaagtggggagttacccaggaaccccgcgggacatggctcgttgagacgcaggagggggagcctgggacagagcaggggttcagagctggagagattcatcccgacttactccgtggccatgatgggctcagccctccatgtgctgacatacccaggggtctgtcctgagggttttgacctggccaagctgctctctgtagaggaggaacaggcattggccagagatcctgtctggagggacgttgctcacacctgagagggcgggtgggggtgagttgtgttctgagagcaaagagcaataacacccctcatctccccgcaagcacacaagagaggtctgtcttcccaagggacagctggtggcaggtggccacatcccggatggtgcctgtgtgtgaccatcacacgctctctgcgccccctgggctgcagcaggcaggcaggacacagggtgcctggcttattcccggggaggctgtgggccctcaggcagccactgttctgtgtcaacactaggcttggcctgggatgccccagagaacaggacagatggagcaggggcgggcatttagggagcagtgacagaaagagttgatgaggatggagggaggtcacgaggggaaagagctcagcgtggcgtcgcgtgcaccagcgctgccctgggagatgcctttagctgggcccagggaaggagcaggtgtgtggggctggagctacctacagagggagtggtgttaggttggcggccgccaggtcagagaggagctgacagagtccatgtggggagcatggagggcgctgaggacttgggccgaattgaccctggtgagggtggacccttctgggctgtgggttctaatgagggacgttggcatcccctgggaaggctccaggctgggagggactctgtcgtcctctggtggacagggagggaagtgtgaacggcagcaatcccaggccaggctgcatgttttattccacatggatctgcacacttcacacgaggtcacacttacgttatgttacagctccttcaccttccagccccgtgagtcccagtctgtgtggctctacgttcactgttctccctctttcacaatcagatgtcccaaatgcagatttttgtcaccttctgtgagtttgtgtttgtgtgcagtaggcagcactgtgtataccctgggggcagtgatgtctggggctgagcactgcagttgggcttgggagcagaagagggagcagcaggatgggaagaccaatatcaggggggcagggacaagtcattttcattttctcactcccagggaccagaacccaggattctgactccagggcacagtaccacaccctgctggtgtccctggatgtcatgatgctcatagtgtcatgttgccttggcattcatttttataaggtgtaagtttatttgcctcaaatcagaggcagggcttggtcaccatggcagttttcaatactgtatctggttcaggtggctccagttggtgtccagagataaaatcttagaggcatctctgctgcttggtgtgctgggctcccgtctctccagctgctttccttaaactgataattctgacattcgccctcacatttaaagtgaccacctctcagtcacagcgtgagctcctggtcccagtgtttgctgcttgctttgaacacatccattaaagctccctgctggaaacctgtcagataacaccctggacttaataaagccattcgcttacaggtctcttctctcctccctgcctgggctcactgacctctgtgtctgtggtctccaggtgtgccaagtgctccccagtgtctgtaagtagtaaaaatcttacaatttcacattgtggttgtattgctgttgcctcacatgccatccagggcctgacattgaggctgccttatgggacctgtgctggctgagcccctgctggagctcttgttttggggcctctggttctgctggggacaggagcttccagctaacttgattgaaaactgatgcctttcattgaaaacactgggtcagatgatgtattcatgggcttcagctgccataacaaacaccttagcctgggtgaattaaataatagaaatctatttttcacagttctgtgaataatgtgctattttaaccactttaaaataaacaatcaagtgaaattaaccacatacacagtgttaaattaccatcaccagtatttttcctagaaaatttttatcattttaaactgaaactttgtatcttttaaacaataactccctgtatgttccaccctagactttgatcatctctactctgtctctatgaatttgcctattcttaatggttcatataaatggaattatacaatggtgttattttgtttctgacatatttcacttagcataatgtttccaaagtccatgcatgttccagcgggtgtcagagcttcattcctctttatggcagattaacattctgttgtatgtgtcaccatatttatttattcatgtgttgatgaacacttggattgttttcatattttatcttttgtgaataatgctgcaatcaacattcctatgcaagtacctgtttgagtccctggatttaattttttgggtatatacctaggaatggatgttgtttcaaatgagaattctatgattagctttttgaggaacaggaaaactgtttctcctagtggctgtacatttttatattctcaccagcaatatatgaggattcgaaattctacataatgctgctacttgttatttaacattgtaaaagaatggtagccagttttgtaggtgtgattggtgtctcattgtagctttgacgttgtattttcctaatgactaatgatgttgagtatcttttcatgtccttcttgactatttgtatatcttctttgaagaaatgtctatttgagtcttttgcccatttataaattggatggtttgtccttttgttattgagttgtagctagttcttgatattatctggacatgaaaactgcctatatgtggtttgcagatattttctctcattctgtgcctattaattattttcttgataatttcctttgatgtacaaaaggcttacatcttgataaagcccaatttatctttttttcttgtttctcatgcttttgtatcatatctaagaatccactgcacatttgagatcatcaatacttacgtctatgtttattttaagatgtttttatggttataggtcttatatttaactcagtgatcaattttttagagaatggtttgatatcgtgggaggtagaattatctaaattaactgttttgcatgtggttatctagttgtttctgcactatcatttgaaaggagaattgttcctccattaaattgtcttgatacctccttcaaagagtaattgaccataagtgtcagggtttatttctagactctcaattctatcccatttgtctttatgtctatcttttgccagcagcttctgttttaataattgtactactttgtcagttttcaaataagaaagttcaagtcctacaatttatttcggcaagattgttttggctattcagtggtcctttttgaaaggtgggaaggccagtgtttcacaattgggaaagccttttctgtcttcttcagggggaaatttgggagaaccttcaagaaacttattctaagtaggtaaactgtcaccactttatttgctgaagtgctatgttaaagtgtgcattgcctcttgtggaagaattgtgagaccctggaagcacttgcccatgtggtgagagacagtaaattccacgatgaggggggaagggaacattgttttaggacaccgtgttgttggggagttgtatacatctctacttatttatgtctctgtacagtgggtgtagggaccagccccacagggtcggtgggtttttctccacatgtacagagatgagagattgtagaaatgaagacacaagacaaagagataaaagaaaagacaattgggcccagggaaccactaccaccaagacgtggagaacggtagtggccacgaatgccaggctgcgctgatatttattgtatacaagacaaaggggcaggataaggagtgtgagccatctccaatgataggtgagaccacatgggtcacgtgtccactggacagggggcccttctctgtttggcagctgaggcagagagagagaggagaaagagcttacagcattatttctgcttattagagacttttagtactttcactaatttgctactgctaactaaacagcagagccagctgtacaggatggaacatgaaggcagactaggagtgtgaccactgaagcacagcatcacagggagacggttaggcctccggataactgtggttggacctcactaacatcaggccctccacaagagatggagaagtagagtcttctctaaactcccccggggaaagggagactccctttcccggtctgctaagtagtgggtgtttttccttgacactgagggtacctctagtccatggtccacttggcaacaggtgtcttcccagacgctggtattaccactagaccaggagccctctagtggccctgtctgggcataacagaaggctcgcaatcttgtcttctggtcacttctcactatgtctccccagctcctatctatttatgacctggcttttcctaggttataatcatagagcgaggattattataatattggaataaagagtaattgctaccaactaatgattaatgatattcctatataatcatatctaagatctatatctggtataactattctccttttatattttattatactggaaaagctcgtgccctcggtctcttgcctcggcacctgggtggcttgccgcccacaagtgggcatctccgttggacacagtaggttttgaaatccttgtttattctctggggtctgggtcttggcttacctgttagctgcagctgaaagaggtgtctgctaagtcaatgacacctgtggggagaagaaggattcagcagagtgaaagtagctgggactcagagaagccaggaaagtctgactcttagaaactgtgggtcagcagatgggtgtcctcagggataaatgggccatgccggtagccactgcagtgaactggaagaaggtaagggatgctgggtatcccatgttctctctcagctctgcagctgaagatttgggccctgggctagtacagccctgcagcaggggaagggtatacaggaatggctgcatatcaggaccaagtccatgtcatcttcttaggcattgttactgcagatggaggattctgttcagagacctggcctggacacatgggagggcccaccccattcttttaaaattattttaagagaacagtattagcaaatgtggtacatgttttattctgctagaatcagtattactgtcacgttttacactgtatctcttaggaaatggtgagagccatccacacaatgtgcatttaaaggagactctactataatttcagctttcctactctttatagaaaccatcttctctgcaaacacacaggcaatatctctgtgttcatttctattgggagccctgtatgcaagatggagagagccacatttcccctgagatgttacgtaaaagtttgaggttgagatgacatatctgacactctgttgttaccctcagaagctactacatgtgaaattctaatgactgcattatcctgccaagtgaaagaggcaggcatgagcaaggacggttaagaggggtgggagccttatcatgatggggagtcttgttctgacatctttggaaaaactgtccacagtgtgaagtcatcaacttgttatcctggtttacagtttgagtagctgttgttatggtgtcgaacattttggtgagttctgagtggctcacatgtcaggtacaagggttttcccatgaaatttacatcgagttgtccacctccagcttatagggcttctggaacagagtgggtcttgctcttcgtgattccatgggagaaaatggaattggaggaactagtagaattcagggtaatatccagtctacaggtggataataaaaacacagaaacaatgaacagagctgcaatctcataaccggtgtactacagtttttattttccacataatttttctctctatgggcatctctagttttaccaatgataatttcagtagaataagtttgtttgcaaaataggttgagtttcttcaaacgtggtctgattctttacataagtgcagcaagagtagcaatagaccatgtaggcgctcttttagaattttatttgctctaagtttttataaggactctcagattaaacttttacaaaacccttgagaataggaagccaaaccaaggctgacttcagactttgcctgcagttcatattggttcattctatctatattcttgaatataacatcccagtcaaagccttggtaatataaccaatgatttgaaatgtgtcctgttacaaagagagcagattgttactgtacttgtgcaaatatgtgtattaccataaacatatcaatactcatgaatagttgcccaattctggggcagtcaggtagagagcaaaagtaaatgtttcaattacggttcccagaagtatagtttattgaactgctacaagctatagatagattaaaagaaaaaaattccataaatctagaaaacaaaccatttaaagaatcagcaaattttcaaataaaaatcataaaaatattatcctcaatattgtcaattatttcaatgaaatcaatgtttctcctgcttggtctaggctgggaattttaagaagatatcagcctgtttgttaaagttttggaagttcttagacaaattgggagtgttcaggagtagaatttgggatttgcttgtgcccatgggacacaggctgggaataaaaatgttttcctcactcttccctgaatgccagatagactccacctaaatccctattgccaaggatgctgggatccacttaccagagactttgactgtgatggatttggagctttccttgccagtggctgagttacgaacagagcaagcatagagcccactatgctttgtagttatttgggggatagagagcttttgtcctgatagctgaaacttcccattaattgtccaagaatattgtgcccgtgggttagactcggcgaagcaggacaagtagaggttttctcctgaacggtaataggtgaatgaagggtaaatgctggggaggtctggaccatctggcgcaaagagaataaagccataggtgatgtcatccgagggaaggggatgttcctggtctcttaaagggacacagttaccctctaagccaagacacaccttcaagtcccagccaaactccctctatgttcactgagccgaagcctgaggtattcacctgtttctcccatcacaagttttaggccccaagtctcccatgacaagagcgtcccctccccttatattcttggttaaggctgtgcctacctaggttttcccagggcagggagtcatggccacctcggatgtccagaagtaaaggtgtctatacttggactggagagagactgagagacctggcctctggtggtttggatttaagctggtgtcctggcccacagaggaacaaaagatactcacagaggacattcagggtgactgggtcactgcggatgccaccatatcggtcccgtatttcacattgataaggtcctgtttcatttctcgtgacattgggtagaatgaggatcctgttttcaatgggtcgctttaccctgggactgacagggaggctctgaccatttagccaccaaatgtaggtgtagttcttactcttaggttcacaggtgaaggttaagacatccttattctctctggggtttaagttgttgattgtgatgtagggcttggacagctttgctgtgtggataacagagagaagattgtcctgtgtggcacctttgattcctccacaggcatacttcaatcagagttggcatctcccacctctcagcccacccgagtccttgaaagccaatagctggtgcttctgtcacaagatagatgcatgatgatctaagggctcaaagactgtgaggccacctgctctgttttagggaggcacagactttctcaagtgtcaattgagcagcagtgttgggtcatggacagacatatcagtgggagtcacagccccttgtacccctcccagtccctccctaatcagttaacttgctggctcaccttgggttccttacctggaatgtgcaactactgggccccttccaaattccatcctcctttgcccccctagatgagatttctctgcagcttccatttcaaggacattctagagatgagtaataatgggacttcccattgtcctgaaaccctgaagatactgagcagtctggcctgggactggatgtttcagcagaaataacacaggagagaccagagtcaagcctggaggtcagttcagtcatcagccagtggaggcagaaagtggggcagtgttttgcaggtgtttcatgatgacttacttgaaccagtgacctctaaagatagagcagagtgcaaggaatgatctagaaggagtcaaggggacaggcaagagctggtggctttggagcagaaccatgttccctgtcctgggttctttaagtttcctctccttctgcagagggcaggtgaggaccatgtggatctttccagaaatacatatggacatttgcaaaagcagaactgactggtggaaagtgtgggaatgaactgctggaaatctggtcctcatggaccatgtgtgtttgatggatatgagacaaatttggagagaagttttgcaaatattttctttcattggacattctactctctgattccctgggttcgactactctagggacctcatgtaagtggattccagagtgaatatgagaagagactgctgtttgccaggagctgggagtggggagaatcagaagttgttcatgggtgtgcagtttcagttatgcaaggtggggaggttctggagatctgctgtagagcttgatgcctataattcacacagattgagtattatgcataagacttagaacaaaaagtgttttggatttctgacatttttttattctgaaatatttgtcatatgcttactggtttagcatcccaaatctgaaagattcaaaatctaaaatgcttcagtgagcatttcttttcagcatcagattagtaggcaaaagtgggaggtgataagccaaagatattcttgccctttttttttctctcaccacgtttctagcttgatgattagtttttggtcaattccatactggccatgctgcactcatatattttttaaagctttgggatgtgagaaaggctgattgctattttctgtcgtcagaactttccacgttttcatggttgcctctttttctcagtgtttctgttgtggcagtcattaataagagcctgtcaggtcagatttaggacagagttttataattctgcaaaaaaatgttactgggattctggtaggggttgcattgaatctgcaactaactttgggtagtattgtctttctaacaatattgattcttccaatccatgaaaatgaaatgtctttccatatattgatatcgtctttaatttctttcagcaatgttttgtagttttcaggatataatcatttgacctttttgattaaacttactccaaaatattttattccttttgatgttaatgtgaattgaaattatttccttaatttcctttcagattgttcattgttagtgtatagtctaaagaatgacctagaaagagtgaaggggacaggcaaaagctggtggttttggagcagaaacatattccctgtgctgggtttttgattttccctctccctttgcagagggcaggtggcttttccctgatagctagatagacttcactggaaaacatattgccaatgctccagggatccacttaccaggcactatgatcctcttgattatgagatttgttccatcagtggctgagttatggatgaaacagacctaaacccctctatatgttttagtgatttgggggataaagcacacttgtgctgattgctggaacttcccatcaatcagccaagaatgctctgccagtgggtgagagtctgtgaggcaggagagattggggaattcccctgtatggtaataggtgtatgaggaagaaatggtgggggcatccaggccatctggagcaaagagaataaagtcacaggtgacattgtcagagggaagggaaaatcctggtctgtggaagggccacagtgaccctgtgagccaagtcgcaacactgaagtcccagccaaatccccgctgtgttcactgatctggagcctgagaccttcacctgtttctcccatcacaagctgtggaacctgagtctcccatgacaggagcagcctcttttctcctattgtggatcaagcctaggcctactctggtttgcctggggcagaaagtcatggccagctttgatgtctaggggtaaaggtctctgtacttggacctgagagggactgagaggcctggcctctggccatgtgtatttgggatggcagcctggctcacagaggaacagaggatactcacggaggagattcagggtgactgggtcactgcggctggcactcactgggttccgtatttcacattcatagggtcctgcaatatactttgtgacaccaaatataaagagggtcctgttggttttggacagctgcaacctgtgagtcatagggaggctctgaccattcatccaccactggtagcttgcggctggagtcgcaggatcacaggttaagatcacagcctccatggcctccctgggatttaagttgctgctggagatggagggcttgggagtctccactgtgcagaaaacagagagaggtttgccctgtgtggcatctttgattcttccaaaggcatttttcaatcagagttggcatttcccacctctcagcccacccaagtccttaaaagcccatggaagatgtgtgtgttaaagacagatgcatggcaatctgagagctcagagattgtgaggctgcctgctttatgtgggagaagcacagactttcttaggtgtgaattgagcagcagcattgggtcatggaaagacacaggaccagcagtcacagacccgatgcctctctgagttcctccgtctccaactgcctgcctgacccaccttgtggtcctcacttggagcatgcagtgctggaatcttcttagtttcagtcttactttgccccccgaggtatgttttctctgcagcttccctttccaaggacatcctagagatggatgatggaacttcccattgtccttaaaccctttgggtactggaaagcctgacctgggactgggtacttcagcataaataacacaggggagaccagagtcaagcctggaggtcagttcagtcatcaggcagtggagccacaaggtggcgcagttttcccaggtgtctcatggtgactgacttgagccagtgacctctaaagatagagcagagtccaaggaatgacctacaaagagtgaaggggacaggcaagagctgatagctttggaccaagaccatgttccgtgttctgggtccatgatgctcgcttccccctgtagagggcaggtgaggaccatgtggatctttctagaaatacatgtggatgtttgcaaatgcagaactgactggtggaaagggcgaacatgaacagatgatggaagtctggccctcatggaccatatgcgtttggtggatattagaccaatatttgggaagaagtcttgcagatactttctctcattagacattctactctctgattctgagtttgactactctatgtacctcatataagtggattccagagtgaatcagagagtagaatagtagtttgcaggagttgggatcaggggaatagggtgttgttccatggttgtgcattttcagttatgcaggatgaggaggttctagagatctcctgtacagcttcatgcctatagttcatacagataaagtgctccttatgcagaaaggttaaaacaaagtgttttcgatttctaatttttttattttggaatatttgcagtacatgtactggtttagcatcccaaatctgaaaaatttaaaatccacaatgcgccagtgagcacttctttttagcatcacatcagtggtcagaagggttgagttttgagcatttcagattgtggatttctggatttgggatgctcaatttgtaatactgtaattttcccgtaaaaagttgtcaggaatttagacctcatgttgtgttctgactctagtaacaaaaaaaaatttggaggaaacattaaaatgttttcataagtggaaacttttactgatgatccagacatcgaagatcaattgctggtagtagtatttctcttgagaccaaaataaggtttaggtgtgccgtgaattccagcaggatcacattatgctcaaagaaagatgccaaaggtgattggaaattagcagctccttaagtagagagagtcccattaaaaggacagaactggtcagtgcgtcaattacataaagggaggaaggatgccaaattaaaagaagtgatgtgtgttatgttagtaaatatagaaagaactccctgcttctaatttctgtgcagagttaggaaaaatggggaggaccccaaaacaggtatgtggaatgctttcttcattttctgttaagctcaggaaataccactaaagtttaagtttgtgtgaaataggaagagtctaagtgagatgccaatggctcgtgtgtctgcccacgtgaagaaatccaacttatgaaaatggcatcatcatgaggaaacagttgtatgtggcacaggcagtaaaaccatcagatagcacccacctggtcacctccaactggtccgcaacaccaccagtattcccattatgtgtatgttacagcctttgtagttgtcccacaactacaaaatttaaaaattgctattgtcaaaaaaaatattaaatatgaaggcgaatatgttgttccacttttttttccccaccctttttgaactttcctgtttcagttttggaagtttctattgacacatcctcaagctgggggttccttcctcagctgtgtgcagtctaccagtaagcatcaaaagcattcttcatttctctaacagcattttttttctgagacagagtctcgctctgttgcccaggctggagtgcagtggcatgatctcagctcactgcaagctccacctcctgggttcatgccattctcctgcctcagcctcccaagtagctgggactacaggcatccgccaccaagcccggctaattttttgtatttttagtagagacggggtttcaccatgttagccaggatggtctccatctcctgaccttgtgcctgcctcggcctcccaaagtcctgggattataggcgtgagccactgagcacagccttctctgagggattttaatgagttgttgactttttacttagtgttagaacggagtcacaaattttaagcttgttatatgcctgacaggaagccagaagtctctaggaagtgacaggagaatgtgagctgcatagcaggttgaggatggagtcccaagtgatacaggagaaatgagtccatgtgctttggggactgcaggcctgtccagcctctgacaccctggtgagtcagtgcaaagattacagcagtgacagcaaactagcatgtctgagtccatctggcatctagtctcaggctggctgtcctcactcgttcctgggcataggccaggctaaccttgggaggaatttagtttatggtttgactttgaagcaggaatgataatagttcctccataaaactaacacccttactttgcccagggacggcctttgtcaaactagtgaaagaccatgagattaagattataggagggaaccgaattctgctaaaatgtaggcacagtttatgtaatccctgactgctccagtgtcatttggcaagagtttacaaaatttgtaactaattgctcctatagataacatcactattgtagaacgcgagactggtcttttgagatgtttctcattcttttgcattctggcaaccggctgacctcattcatacctatgactaatggctcagccagtcatgtggtccctacctagaggcagattcaagcacaaacagatcatttccctccgcccgcatgattccatcaccaaacaatcaccaaaaaatgagcagtactcaatttttagtcctgtgaccctgaaactgtccttgaaaatctctaacccctgctccactggggaggctgatttgagtactaatcaacctccagcctcctgtttggcagacttggagtcgttaaaatctttcttgactagaaaccaacatttcaataattttgtgtgtgtgtgtgtgtgtgtgcagaaggccagaagaacttgtctggcaattatgagtggatggaggaactgcctatccctgtcccattgtcttgtccacaggtcagcctcacaaagggaaagagcccttgaagggaatacagtagaagctcattctcttagtgacctggggacattggctcgagatgaagcctggcaggagtggcaactccaggtgatttctgcacctttcctatttcctgggaggtgggccaggccacagtgttagcgggaaaggaactgaacagccagactagtcagagggagtgtctggggaaggcctaggggtgggggaagaagctgtgcaggacagggcttgccagtcagaatgaagtgggaggaagatgagggacacagagaagaagagagaggcagagacaccatggcagtgagcagtgagggttacactgacttcagagaccccagggaccaggtgccccagttccacagtccaggaccaaggagcccagagaaccctctggtggccaaagagcttcagagttacatgaggtggggtggctttaggggcaagaggtagtggggggatgaaacgtgggtgtcagcctctgaaggacaagggacaggtgtggctagaacctcctatgattctgcatccaacatccagtctctaaagaggttttggatcattcatttcttcattccattccttcatttgttatgtgagagctcctgagtgtgtgtctctcgctgggcctgtgctggtgcagggtgtgagtggggaaagaaaacaaggtcctctccttgatcttctcatgacagtgacatgggcactttgggaaacacaggatttcaagttcagtgatgggggttaagatctgagggggaggcctggacatattttttgcactgactctgatggttgaggcaggtgatttagttctggagtgcagactaatcagctgaccatttgctctcactcctctgaggtttggatgcctaaaaagagaggatttgagccaataaatgactatggggtgcttggaacccagtaagccctcacttctggtggaggagaggaagggcctgtggctgcagacagacctcatgtgaccccgatctcccctttgtgttggtgtgactctggttcagtgactgtgccttcctgtgcctcagttttctctcaatcaaataagctaaatggcaaatggactgtggcttttcatgctatctgtgaataaatgttaaatgattcacagtcacctgacctaatgcttggcacagtggaggtttcacacaaacagcatttattattaatttgcttccatgagaaaacacctttacatcagatccctgtggacaatctgctaccaggtacatcttctccttctgtttctgcttctggggacattagactttctatggactctcctaagccgatgtcctacaaagcttgtctttctatcctctccactctgagtgtcaggtgaagaaagctctgtccttgcccagatgaggctctgagggctgagccctggctggtgaacagctccaggagacacagtcctctgacagctggtaaattcttggtcccagtaaggcctgcccaagaaggaacaacccagcactggcacaggctcctcagctttatctggagcaaggatttagggacagaggtctggggttgaggcttctagggctgagctgctctgagagtatctcagggggcccctcaggccagccctactcagttctccagggtctttgtcagcgtcaaatttatgaagagggcatgaggtgcttgtctgagactgatctcctcctgctgagtccccccatcagactgtccttcctctgcagcgagtgtctgcagggtctgaatgcgggaaaggaattctgatctgttgaaatttgtctcctctgtgtgtcctgcactaaatgcccaaaccccagcatgggacttaatgcagagagggacacaggcagagtccaggcctgagaatcctgtgtgtgtgaagtagaagtgacccctgtcccccaacacccagggatcatgtggaatcactcacggtgtaaggtgaaggtgaaatgtccagttactcctccagtcccatcgcgtcgctttatgatgtgtaaggtgtaggatcctgcatcctcctgcgtgacattctggatcagcagggatgcattggaatatactctttctcttccactgtatgcaggcccatatataattctttgaccgtctactacatatgatgtaatgtaatggtagaggtatgtcatttgccctttgtaccaaatgtagccagcaagattctggggcaaattgtggacaagtagaagaacatccttcccctcagaaactttgggtggctgggcttcaatcgtgacttgggcagttgtgggcggattccagaagtttaaaagtgatgctaggaggtacagagagcatcagttaatattgagacctatgtattggggtgaaaagatgggtcctgagaaggtctcttcaatcctcagccttgaagacacacaaacacacacatacaaacacatacacacactaaaggggcgtgagtgtatgtgtgtgtgtcctactgtcccactaggtcaagatcagcagcatgacccccattccttcaacacttctgaccttggcatttttctttttggattcctcttccccaggggtccgcacggccccctccacactgccctcaggtcctgctcacatcagggcatccttagacttctttcctgatacctccttcagagaccctgggtcttccctttctgacctttccctgctctcctccctccagggttcttgtcaacacctgatctcacattctagatcacttagcatgtctgtcttccccccacgatgactgtgtgagctccgtgaggacagggacttttgtgatcttggttgcaccccagtacctggaacaggcggcagactcctgtagatgtgagagttctcagggtctccaccctctggatgtttctttttccccccaattgttgaggtttcttgctgaggacagtgtttcatgtcctgcttatattttcatttgaagtgtcatctgatatagttattgttatcatttttcaaaatatggtggcccctgatgattaatcaggaaaacagaacacttaagattttcctaccacttaccaattccgcttcaatgtgactttcctattttgaccctctggtgtattttcccctatccaggctccaacagagccttctttcccttttcttcttttttctttttttccttttttcttttttttttttttgagacggagtctcgtcctgtcacccaggctggtgtgcagtagtgctatcttggctagctgcaacttctgcctcgtgggtgcacgtgattctcctgccacagcctcctgagtagctatgattacaggagcacaccactatacctggttaattttttgtgtttttagtagagacagggcttcacagtgttggccagactgatcttgaactcctgatctcctgatccacccaactcagcctcccaaagtgctggcttctttcatttttcagaaccccatcctctccaggagaccccatccagtcactctgcttcctcctcctgtcctctcccaggaagttctctcctcacctgtgagcaggacccccttccaggtgatgcgctgtgtgcagggaggggctgagaggggccccatggtctctgctgcttgtgtgttctcctctgtggagataagcctaggatccagaagcttcctgagtacggctgtcagctgtgctgtccttcctccttctgtgctgagcctcctcccggggcaggagcatttctcaagctcgtgggcggggtcaggcccaggacacctctctgtcccctcctctctcagttctgcctccttgtccctcctgtttttccttttgtctgtgtttcaggtccctgggaattgtggaggcctctgcatttttcagcagtgattctttcaccaaacctcaacacacactttgtgcagatgcacacacacacacacacacacagaagagacacacacgacccacatggtcacacacataccctgcaggttaggcaagcagagtcctgggcctcagcctcctgctgtccccatggctctggggtagggtgcacattcacgccctttaccctcttccttcctcatctggctctccccttcagtgcaggagctgcacaaggttcccgtcacagtgacgtcccattgtgctgtgggtgagctctgtgttgtctggtaagagggacccttcctttctctaatcgtgtctagcttggctgcagcttccaaggatgaacattcagtacctgggtttcccagaggaaactatccatcctggaggtgtgcagggtgaatctctcaggcctcttgggaggagaggcctgtgctgattgctcagtgggggctgtgaatcccagagtcaaagggacagttctcggtcactctgtgtctccctggggtctggcggctgagctggagctcagggtttctcatgttctccctgaccacctttgatgtcctctcttctctgcccagctgattgtcctgtggtcaccacaccttccccgtggtggtgcaggaggaagtggggagttacccaggaaccccgcgggacatggcttgttgagacgcaggagggggagcctgggacagagcaggggttcagagctggagagattcatcccgacttactccgtggccatgatgggctcagccctccctgtgctgacatacccaggggtctgtcctgagggttttgacctggccaagctgctctctgtagaggaggaacaggcagtggccagagagcctgtctggagggaccttgctcacacctgagagggcgggtgggggtgagttgtgttctgggagcaaagaaaaataacaccccccttctccccacaagcacacaggagaggtctgtcttcccaagggacagctggtggcaggtggccacatcccggatggtgcctgtgtgtgaccatcacacgctctctgcgccccctgggctgcagtgggcaggcaggacacagggtgcctggctgattcccggggaggctgtgggccctcaggcagccgctgttctgtgtcagcgctaggcttggcctgggatgccccagagaacaggacagatggagcaggggcgggcatttagggagcagtgacagaaagagttgatgaggatggagggaggtcacgaggggaaagcgtccagtgtggcgtcgcgtgcaccatcgctgcccgggagatgcctttagctgggcccagggaaggagcaggtgtgtggggcaggagctacctgcagagggagtggtgttaggttggcggctgcgggtcaggaaggagctgacagagtccgtgttgggagcatggagggctctgaagacttgggccgaagtgaccctggtgagggtggaccctgctgggctgtgggttccgctgagggaggttggcatcccctaggaaggctccaggctgggaaggactctgtcgccctctggtggacagggagggaagtgtgaacggcagcaatcccaggccaggctgcatgttttattccatgtggatctgcacactttacatgaggtcacacatatgttatgttacagctccatcaccttccagccccttgagtcccagtctgtgtgactctacgttcactgttctccctctttcacaatcagatgtcccaaatgcagatttttgtcaccttctgtgagtttgtgtttgtgtgcagtaggcagcactgtgtataccctgggggcagtgatgtctggggctgagcagtgcacgtgggcttgggagcagaagagggagcagcagggtgggaagatcaatatcggggggcagggacaagtcattttctttttctcactcccagggaccagaacccaggattctgactccagggcacagtaccacaccctgctggtgtccctggatgtcatgaggctcatagtgtcatgttgccttggcattcattttttaagatgtaagtttatttgcctcaaatcagaggcagggcttggtcaccatggcagttttcaatactgtatctggttcaagtgactccagttggtgtgcagagataaaatcttagaggcatctctcctgcttggtgtgctggactcccctctctgcagctgcttctttaaactgataattctgacattcgccttcacatttaaagtgacctcctctcagtcacagcgtgagctcctggtcccagtgtttgttgcttgctttgaacacatccattaaagctccctgctggaaacctgtcagataacaccctggacttaataaagcctgggctcactgacctctgtgtctgtggtctccaaatgtgccgagggctccctagtgtctgtaagtagtacaagaacatacattttcacgttgtggttgtatcattgtagcctcacatgccatccagagcctgacattgaggctgtcctatgggacctgtgctggttgagcccctgctggagctcttgttttggggcctctggttctcctggatacaggagcttccagctaacttgattgaaaactgatgcctttcattgaaacactggctcagatgatggattcatgggcttcagctgccataacaaacaccttagcctgggtgaattaaataatagaaatctatttttcacagttctgtgaataatgtgctattttaaccactttaaaatccacgatcaagtgaaattaaccacatacaccatgttaaattaccatcaccactattttccctagaaaatttttatcattttaaactgaaactttgtatcttttaaacaataactctttgtatgttctactctagaccttgatcatctctactctgtctctatgaatttgcctattcttgatgtttcatataaatggaattatacaatgatgttattttgtttctgacatatttcacttagcataatgtttccaaagtccatgcatgttccagcgggtgtcagagcttcattcctctttatggcagattaacattctgttgtatgtgtcaccatatttatttattcatgtgttgatgaacacttggattgttttcatattttatcttttgtgaataatgctgcaatcaacattcccatgcaagtacctgtttgagtccctggatttaattttttgggtatatacctaggaatgggtgttgtttcaaatgagaattctgtgattagctttttgagaaacagcaaaactgtttctcctagtggctgtaccttttatattctcaccagcaatgtatgaagatttcaaattctacataatactgctacttgttatttaacattttaaaagaatgttagccagttttgtaggtgtgatgtggtgtctccttgcagctttgactttgtattttcctaatgactattgatgttgagtatcttttcatgtccttcttgactatttgtatatcttctttgaagaaatgtctatttgagtcttttgcccatttataaattggatgatttgtcctttctttattgagttgtagctagttcttgatattatctggacatgaaaactgcctatatgtggtttgcaagtattttctctcattcggtgtctattaaatattttcttgataatttcctttgatgcacaaaaggctcacatcttgataaagcccaatttatctttttttcttgttactcatgcttttgtatcatatctaagaatccatggcacatttgaggtcatcagtatgtacctctgtgtctattttaagatgtttttatggttataggtcttatatttaactcactgatcaattttttagagaattgtttcatatggtgggaggtagagttatttaaattaactgttttgcatgtggttatctagtttctgcactatcatttgaaagaagaattgttaatccattaaattgtcttgacaccctcttcaaagagtaattgatcataagtgtgagggtttatttctagactctcaattctatcccatttgtctttatgtccattcttttgccagcagcttctgttttaataattgtactcctttgcgaggtttcaagtaaagttcaagcctacaatttattttggcaagattattgtggctattcagtgttccttttctgaaaggtggggaggccaatgtttcaccattgggaaagccttttctgtcttcttcagggggaaatttgggagaaccttttaagaaactttatctaagtaggtaaactctcaccactttatttgctgaagtgctatgttaaagtgtgcattgcctcttgtggaagaattgtgagaccctggaagcacctgcccacgtggtgagagacagtgaattccatgatgaggggcagagaggatgttgttttgtgatacaatgttgttggggagttgtatacatctctatttctttgtctctgtacagtgggtgtagggaccagccccacagggtcggcgggtttttctccccatgtgtggagacaagagattgtagaaataaagacacaagacaaagagataaaagacagctgggcctggggaaccactaccaccaagatgcggagatcgttagtggcctcgaatgccaagctgtgctgatatttattggatacaagacaaaggggcaggataaggaatgtgagccatctccaatgataggtaaggtcacatgggtcatatgtccactggacagggggcccttccctgcctggcagccaaggcagagagagagaggagaaagagagagagcttacagcattatttctgcttattagagacttttagtactttcactaatttgctactgctaactaaacagcagagccagttgtacaggatggaacatgaaggtggactaggagtgtgaccactgaagcacagcatcacagggagacaggcctctgaataactgcgggttgacctgactaatgtcaagccctccacaagaggtggaggagcagagtcttctctaaactcccccggggaaagggagactccctttcccggtctgctaagtagtgggtgtttttcctcgacactgaggctaccacgacatcatggttcgcctggaaaccggcatcttcccagacgctggcgttaccactagaccaaggagccctctagtggccctgtctgggcgtaacagaaggctcgcactattgtcttctggtcacttctcactatgtctccccagctcctatcgctgtatggcctggcttttcctaggttatgattatagaccaaagattattataatattggaataaagagcaatgctaccaactaatgattaataatattcatatataatcatatctaagatctatatctggtataactattcttcttttatattttattatactggaacagctggtgtcctcggtctcttgcctcggcacctgggtggcttgccgcccacaagtgggcatctccattggacacagtaggttttgaaatccttgtttatcctctggggtctgggtcttggcttacctgttagctgcagctgaaagaggtgtctgctaagtcaatgacacctgtggggagaagaaggattcagcagagtgaaagtagctggggctcagagaagccaggaaagtctgactcttagaaactgtgggtcagcagatgggtgtcctcagggataaatgggccatgccagtagccactgcagtgaactggaagaaggtaagggatgctgggtatcccatgttctgtctcagctctgcagctgaagatttgggccctgggctggtacggccctgcagcaggggaagggtatacaggaatggctgcatatcgggacaaagtccatgtcatcttcttaggcattgttactgcagatggaggattgtgttcagagacctggcctaaacacatgggagggcccaccccattcttttaaaattattttaagagaacagtattagcaaatgtggtacatgttttattctgctagaatcagtcttactgtcacgttttacaatgtatctcttaggaaatggcaagagtcatccacacaatgtgcatttaaaggggactctactataatttcagctttcctactctttatagaaaccatcttctctgcaaacacacaggcaatatctctgtattcatttctattgggagccctgtatgcaaggtggagagagccacatttcccctgagattttacgtaaaagtttgaggttgagacgacatatctgacactctgttgttatcctcagaagctactacatgtgaaattctaatgactgcattatcctgccaagtgaaagaggcaggcatgagcaaggacagttaagaggggtgagagcctcatcatgatggggagtcttgttctgacatcttgggaaaaactgtccacagtgtgaagtcatccacttgttgtcctggtttacagtttgagcagctgttgttatggtgtcgaacattttggtgagttctgagtggctcacgcttcaggtacaagggttttcccatgaaatttacattgagttgtccacctcccgcttataggacttctggaacagagtgggtcttgctcttcgtgattccatgggagaaaatggaattggaggaactagtagaattcagggtaatatccagtctacaggtagataataaaaacacagaaacaatgaacaaagttgcaatctcataaccggtgtactacggtttttattttccacattatttttctctctatgggcatctctagttttaccaatgataatttcagtagaataaatttgtttgcaaaataggttgagtttcttcaaacgtggtctgattctttacataagtgcagcaagagtagcaatggaccatgtaggatctcttttaaaatttttctttgctctaagtttttataaggaatctcagattaaacttttacaaacctcttgagaataggaagccaaaccaaggctgagtttagactttgcctgcagttcatactggttcattctgtctatattcttaaatataacatcccagtcaaagccttggtaatataaccaatgatttgaaatgtgtcctgttacaaagagagcagattgttgctgtacttgtgcaaatatctgtattaccataaacatatcaatactcatgaatagttgcccaattctggggcagtcaggtagagagcaaaagtaaatgtttcaattacagttcccagaagtatagtttattgaactgctataagctatagatagattaaaagaaaaaaattccataaatctagaaaacaaaccatttaaagaatcagcaaattttcaaacaaaaatcataaaaacattatcctcattattatcaattgtttcaatgaaatcagtgtttttcctgcttggtataggctgggaattttaagaagatatcagcctgtttcttaaagttttggaagttcttagacagtccagtggtataatctgaaagttatcagaaacttgtattaaagagttcttgtcagcatcttttccataaatctccttgaaaaggaagcagttttggactgtagctgattggaaatgctttgaggaagaataaaaacaacatctgtgaatgacaaagattttaaatgactatggtttaaactctgatgataattcattatgataacacagctcacaaaaaaagttacttctgtggtatatgacattatggctgataacatatttaatttctaggaatctcatacaatttctggaacaatcatatcagtaacatatccattaatataacatagagaaagtttagcatcctttaccacttatgatttgaaaatgcttttcatataattttacatatcaaataaagtggcttttccatgtagcttgtgtttctcagcaggattactgaggtctttgtggaggccattaatgaatagggccaggaaagtataggctcatgtatgctgaaaaatttccctagataattccaatactcccagctaataagcattaatttaggtctaagttttacctattagaacagctgttctttatcctggttacacattagtagcatctgggaagacttaaaaactaacaatgcctgccagatgcagtggctcatgcctgtaatcccagcactttgggaggctgaggcaggtggatcatgagctcaggagatcgagaccatcctggctaacacggtgaaacactgtctctactaaaaatacaaaaaaattagccgggtgtggtggtggttgcctgtagtcccagctacttgggaggctgaggcaggagaatggcgtgaacacaggaggtggagtttgctgtgagccgagatggtgccactgcactccagcctgggcaacagagtgagactctgtctcaaaaaaaaaaaaaaagttaccaatgcctgagtctcactttagaccattaaattggatcctctgggtggggcttgggcatccatttaaaaaaatgttttctggtgattccaatgtgaagctatatttcccatcagatttctctgatttcttgtggcattcactttttttctattttggtattataattatttttctggtcttatcatctatcttaggctttatgttccttggggtagaaaccttgccttcttcatttctgtatcgttcatgaacatatgagttggtcatcaggaaaaggttctcaatcacatgtaggttgtgttctgagtctcaggtttacacattaatgctggagtcattttcctctgggaggtcagaggttgcttttgatgaagggtatgggtaagcccataatgcagatggtagatgggagatcacactgtttttagccacggcattggaactaagcattctatgtgtatatcaggtggaagggaagggatgtgtagacagacagatttaattagaatggaggaattacactagggaatagaggtaatggaaacagtaaaaattagtaaagagaagaaatgtgaacttatcaaataggcaagagtcgatctctgaagatttttgaataggggagttaactagaatttaggaaggtaacaaggcagtcacacacaaggaagatttcaaagactggaggtaagtcaaacagtacctctagcagttattgaggttgtgggaatggagagaatgacacaagtgagagatgttaaaaaaaaggatcaagaaggttttataagatattgaatctgggaaacaaattagcagaggttgaggataatcatttgtaggagacagtggggtacagggagcatgaagaacaggggagaagagacctgcaggaataaatgctgagaagcaggagtttagtgggaggaggaggagatccagtcccaaatactggcaaagaagtcctttccctctcccaagcaaggcagtcagccctgcaggaaacaggacaaaaggaaaggccatcataccttccagtcttcctgaaataaactacaccagggctggtagatcagagccacactggccagtactccaatcaggatgccgacagtggctctacctgaaaggccaggagtacttcttgtactgaagtatctgtcatggaaagaaaagaagagaaggaataaaggtgatgttattttacagtgtgctaccttaggaaccatcactaagtatgaggtagtttctacttgttccttcagggattaattttgtgggagggttgctggtagatgattagccaactatattcttgcagtttttttatctctcaatgtgtttctaggttagtgatcagtcttctgtcaatttcatcctgaccatgctgcactcagacatttttgaaggtatcataaagatgtgagaaaggctgactgctattttctgtgtcattagaactttctaccctttcgtggttgcatctttttctcagtgtgtcagttgtggtaggcatgaataagactgtcagttctccatggcagcttgtgtttctcaaaaggattactgagttcttggtggagcccattaatgaatagggcccagaaagtataggcttatgtatgttgaaaaatttccctaggtaatcccaatactcccagctaatagttgattaattaataatcaattgacttgattgacagaaggcccagatcagtgcattccaaattgacaacctactttgcatagagtcctcactttcctgaagctcccagcagggatatgaaagcaagccccgttctgcgagattctgttttactctcttgggtgactggtgggaggactccctgtcagccttgccatgctctctttgaactgaagctaaatcttctttctctttctccctcacaggagtcagatttgcatagtgctctcaaggctctcccagacttttttcatgcctgccccactttccctcacaggcatttttcctaatacattatcctgcatgtctaatctcatcttggatgcatctcagtgggtataaactaacataccaggcttgatttttttgcacttagcttttttctctctctcccacatgtagccagtaactgtgtcctagtgttttatgtgttacctgttttttcttgtgtataggaaaaatatatatatttccatatacttatttatatataatatataataacaaaatatataataatataaaatgtataataatgtaaaacatatacacatttccatatatgtatatggaaaaagaggtaacacataaaacaccaggacatttatatataataaaactgacatattttatatgtgtatatatatatatagtatatatatatatatatatgtgtatatatatatatatgtgtgtatatatatatgtgtgtatatatatatgtgtatatatatgtatatatatgtgtgtgtatatatatatgtgtgtatatatatgtgtgtgtgtatatatatatatgtgtgtgtatatatatatatatatatatatatatatatatatatatagtgtctggtagtcttaacctctctataaatacacactttttgtcactgccccttccctcccatgcagagctcccatggccaaatctcctatttctccaagtgtgtgtccctcactgtcctctgtgctgtgtcccatgtgctgtgtccacagcctcctagtgttttatgtgttacctctttttctatatatacatatggaaaaagcatatacatatttatctctatatatttatttatataaaatatataatctaaaagtatatatatacaaccatttaaaatatatacatatttccatatatataaaaaaggttacacataaaacactaggccatttatatgtaaaattcacatatgtaatataaatgccaattttatcatatataaatgataagtatatacacgatagacttatcatatataaggtgaatttggaatgctctgacctgggccctctgtcaatcaagtccctgccatggaggccactcattgctgccacaactgagacaccaagagaaagatgcaactatgaaatggtgaaaagttctaaagtcatagaaaatagcaatcagcctttctcacattccaaatccttcaaaaatatctgagtgcaacatgtccaggatggaatgaaaaacttcaatcttgaaaaggaaaaaggaagctggaggactcacactttcagatttcagcatctactgcaaagctacagtaatcaatacagtgtggtactggcataaaggaggacatagtaactaatggcatagaatagagaacccagaaagaaagcttgcatatatggccaaatgatttttgtcaagagtgccaagaccattccatggggaaaggacagtctttttaacatgtgataccgggaaagctggctatccatggacaagtatgagttgaacctttacctcacaccatatccaaaaaaatgaacccacaatggatcaaagacctaaatggaagagtgaagactaccagactcttagaagaaaacatgaggaaaaagcttcatgatattgaatttcagaatgatttattagttataactacaaaagcataggcaacaaaaaagggataaattggacttcatgaaaatttaaaacttttatatatcaaaggccattatcaagaatgtaaaaaggcaaactatcacatagggaaaatatctgaaaatcatatatctcataagggattaatttccagaatacatgaagaacactacaaaccaaaaacagcaaaaatccaagaacccaataaaaaaatggagaaaagactaaaatagagattttattaaagaagatatacaaatggccaatgaggacatgcaaggattctcaatattaatacttagagatatgcaaatcaaaaccacagtgatacatgacctcacacacattagggtggctttgataaaaacaacatgaacaacaacatcagaaaacaaatgttttcgagtacgtgggaaaattgaagctcttagcgtattactgatggcaatgggaaatgttatagccactgtggaaaaatggcatggcacggccagctcacgcctgtaatcccagcactttgggaggccaagatgggtggatctcttgaggtcaggagtttcagaccagtctggcaagcgtggcaaaaccgcatctctactaaaaatacaaaaattagctgggaatggtggcatgcacctgtaatcccagctactcgggaggctgaggcatgagaatcacttggacctgggaggtggaggttgcagtcagccaagattgtgccattgcactccagtctgggtgacagagcaagaccctgtctcaatatcaacaacaacaggaaagaaaatggtatgtcagattcttaaaaaaattaaagaattaccacttgaaccagcaattctacttccggacatacagccaaaagtattgaaaaaaatttgaacagatatttgtacactgatgttcacagcagcatcactcacaatagccaatgggtggaaacaaccgaaaagtctattgaaagataagtgggtgaacaaaaaggtatatccatgctttggaatgttcttcaatcttcaagggataaaattttgacacatggtgcaaaatggatgaatcttgaagacattatgcgaagtgaaataagccagacacaaaaggataattattatatacttccatttatgtaagatagttagaatagtcaattacatagagacagaaattagaatggtgattaccaggggttaaggggagaaggaatgagagttatcatttattgggttcagaggtttagtatagtaggataaaaaaaagcactggaaatggatagtgttgatagttacacaacactaaatttcacgcttagaaacagttaatggtgagtcttagatatatagtgtctagtactcttaccctctctataaatacacactttttgtcactgttccttccctgccatagagagcttctgtgagttaatctccctatttctccaagtgtgtgtcactcactgtcctctgtggtgtattccatgtgctgcgtccacagactcagagaggcagtgacttcagagccaggacacagccctattcccattttttaaagccttactcatgggaggcttggcttctactggcagctcgatttagccagattcagaaccggccacccaggcaccttatccacatgccctggccccagcccgggtggagtcagggtagggtcagtcactgggtgagcccacagcaatgcagggagcagagtctgagctgcttctccctcacccaaggggcttcctcctctcatttggggaaaagtgtgggcttgttttgaagcctctgatgttcatcacagctcatggagtacacacacacaaaggagacagaagggatattttggtgacagaaacagcttgaccatgaggaccctcctctttctccctccatgaaggcccttatactgcatagtgcttggggctgataaagccatttccctacatttctcaggctggacccaaggtcatccaccagaaatccggaaaacaaagggaagagaatctgtagatatgaattgggagggttcaggagaaaaatttggatttacttttgtgcatgggacacaggctgagaataaaaatgttttcctggctctttcttggaaagccagataggcttcacctgaaagcatattgccaatgctccagcgatccacttaccagggactgtgattttcttggttgcgaagtttttgccattagtgactgggttatggacataacacagatagtccccactattctctgtagtgacttgggagataaagacctcttgtcctgtttgctggttattcccattcagcagccaagaatgctctactgatgggttagagcccgcaaggcaggagacattgaggtttgaccctggatagtaaaaggtgtctgaagaataagttgtgggttcatctgggccatctggagcaaagagaataaagtcacaggtaatgttatcagagggaatgggaagctcctggtctgtgaaaggggcacagtgttcctttttgccaagtcacaaccccaaagtcccagccaaacttcctctgtgttcactgaactggaggagtcaacgacattcacctgtttctcccatcacaagctgtggaaccagagtctcctaagaccagagaagcccctcccttcctgggcctacccaggtttgcctggggcagcaagtcatggccagcttgggggtctaggggtaagtgtattcatacttggacctgagagggactgagaggcctggcctcgtgttatgtggatttgggctggcagccttgtccatgaaggaaaagaggatactcacagagaacatccaggtgactgggtcactgtggctggtactcactacattcttcctttgacattcaaagagtcctgtgtcactccttgtgacactgagtagagcaaggatcctgttatcattggacatctttagcctgggactgagtgtgagtctatgactatttacccaccacatgtagattgtgccatgagtctcaggttcacaggttaagaccacagcctcctcatcctccgcggggttgctggtgacatagggcttgggcagattcactgtgcagataacagataagattcctctgtgtggcgctgtgtccggaattggtgggttcttggtctcactgacttcaagaatgaagccgtggaccctcacagtgagtgttacagctcttaagttgacgcttctggagtttgttccttctgatgtttggatgtgtttggagtttcttccttctggtcggttcgtggtcttgctggttcaggagtgaagctgcagaccttcgtggtgagtgttacagctcttaaggcggcgtgtctggagttgttcattcctcccagtgggcttgtggtctcatggtctcgctggcttcaggagtgaagctgcagaccttcacagtgagtgttacagctcataaaagcagtgtagacccagagtgagcagtagcaagatttattgcgaagagcaaaagaacaaagcttccactatgtggaaggggaccccagcaggttgccactgctggctcaggcagcctgcttttattctcttatctggccccacccacatcctgctgattggtagagccgagtggtctgttttgacagggtgctgattggtgcatttacaatccctggagctagacataaaagttctccacctccccaccggattagatacagagtatccacacaaaggttctccaagtccccaccagagtagctagatacagagtgtccattggtgcattcaccaaccctgagctagacacagggtgctgattggtgtgtttacaaaccttgagctagatagagtgcccattggtgtatttacaatccctgagccagacataaaagttctccaaggccctagcagagtagctagatacagagtgtcgattggtgcattcacaaaccctgagctagactcagggtgctgattggtgcgtttacaaaccttgaggtagacataaaggttctccacatccccaccagactcaggagcccagctggcttcacccagtggatcccacactggggctgcagatggagttgcctgccagtcccacgccatgtgcccgtgctcctcagcccttgggtggttgatgggactgggtgctgtggagcaggaggtggcactcctcagggaggctccccccgcactggaggctcgggccgcacatggagggggtgggaggctcaggcatggcggactgctggtcccgagccctgccctgccagaaggcagctaaggcccggtgagaaatcgagcacagcgccggtgggctggcactgctgggggacccagtacaccctctgcagccgctggctcgggtgctaagcccctcattgcctggggccagcagggccagccggctgctccgagtgcgaggcctgccaagcccacgcccacccggaactccagctggcccgcaagcgccacgcgcagccccggttccgctggcgcctctccctccacacctccctgcaagctgagggagctggctctggccttggccagcccagaaaggggctcccacagtgcagcggtgggctgaagagctcctcaagtgctgccaaagtgggagcccaggcagaggaggcaccgagagcgagcgagggctgtgaggactaccagcatgctgtgacctctcagcaccactgatttctccatgagcattttccaatcacagttgacatctcccacctctcagccaatccatgtccttaaaagcccacagcaggtctgtgtaccaaaagacagatggatgcatgatgatctgagggctcagaggccatggggccacctgctctgtgtgggagatgcatagacttctgaagtgtgaatcgagcagcaatgttggtgaagtgtgaattgagcagggtcaaacaattagagtttaattaactttgtttaaattgggcagagtacaagtgaggcagcagtggctcatgcatctccccaaacgaaggaccacaccttatgacaatgttgttattatgaatacacaggtgtgtatgaaacaggcagtaaatcagacagcacccacctggccagctccacctggtcctaggaaccaccagtattcccattatgtgtatgttacagctttttaggctgcaaaatataaaatacaacttcagaatataaaatatgctattgttgatacaaaatattgaatatgaagctgaatatgttgttccactttttctcactcttgttaaactttgctgtttcagttttggaagttcctattgacacacacttaagctagagattctttcctcagctgtgtgcagcctacgagtaagcccatggagggcattctttatttctcttaaagtgtttttaatctctattatttcttttccttctttcttagaatagccatctctgtttaagtcacccatctattcctgaaaggtgtctcctttttccatcataatccttaaccagagttgttttaaatttccagtctgataatttcaacatccctacaacatctgtgtctggttccaatccttgctctgtctttcaaactgcattattatttttttttttttttgccatagtctgtcttgtatttttttgaaaactacacatgatgtactgggtaaaagggacttgagtgagcaggcattcagtgacatggtggtgagtgtggcgagggaagggttctgtggttctggatgaggtctgtgtcctgggctgtgaatgtcacaagtgcctctcaggtttttctttccattaggtgggatatgatgacttgaggaggctggagttggatatttcccctccccctggccagttaagctcccatcaaaccccagctaattaggctgcagtaaaatagtttctcttaaatttaggtcttaccaagaagaatataattcactgacaactttccaagtgtttttttcccttcttcctacaagaaggatgcagggattcttgtttgatattgactgtgagaacctggtagagctccaggagctaaaagtcataaaactgtccccctactcccaagactaatccatccactgttgtgtttatctctgcgctgtgtccacactgagcctccagaatttcctcaattagagttcaggttttctgaccccagcactggttcccactggggtttctgtgcctatgtttctgctcaggtacggtgcactgctctgtatttgcctgtgggtctctccaatatgtggtccagttagcactgagaacttgcttcctgagaaatctaaacgagttgttgatttttcagtttgttcagctttttacttgttgttagaactgagtgaaaatttttaagctacttacatacctgatggaaattcgaagtctctagggcatgactggaggatatgagcgccacagcaggttgaggatggagtcatgagtgaaatgggtgaaatgagcccgtgggctttggaaactgcagatctgtccttctgcctctgaccccctggtgagtcaatgtagaaagtgaaaccacctttgcaaagcatatgatgatgagagaaagctagcttggctgaccccatgtcacccctagcctcaggctggctgtcctctctgattcttgggcataggccagggtaagcatgggaggaatttatagtttaactttgaagcaacggtgataatagtccctcctgaaaattagctccctccttgtcggggactatcttggtaagtctaagaaaagaccatgaattatggaggggcccaaattctgctaaaatgcaggcatagtttctataatcccttactgctcaggagtcatgtgtccagaggtcacaagatttgtgaatttcctagttgctcctatagatagcaacactattgtagaatctgagatttatcttttcagatgtttctcagatttttgcattccagcaacctgctgacctcatctagactcatgaccaatggctcaaacagtcatgtggcccccactcagaggcagattcaacaaatacagaccatttcccctaccggcatcatttcatctttagccagtcaacagtacttattccttagaactttgcccctcaaagtttttgaaaaactctaacctctgagccattggggaagctcatttgagtcatgataaacttctatcctcctgtttggcagccttgggctaagtaaaaccattgtttactgcacatcgccttctcaataaattggctttgcctgtgcagagggcaagaacatgtcaggtgattataagaatggatggaggagccactgatctctttctggtggcctgtttcatgagtcagcctctcagagggaaaaagccctggactgggacacagtggaagctcattctcctgttgacccggggacattgccttattatggagcctggcaggggtggctgctttggctgattttggtgcatttttcatttaccagaaggcaggacgggcctcagtgtgagcagaaaggaaatggaacagtcagctttgttagagagggtgtctggggaagtcctcagggtggaggaagctgtgcaggaaagggctcatcagatagaatgaaagcgggatgcacttttttcactgaacacctttcagacatctcaccaactctggcctcactgggctgtgcctttcctcctgagccctgagccctgattcctggcagggagggagaaagagaggaagggtgaagctgggatgtgtgctgtccaggtttcttccatctctggaatcttgacagtgagggaccctaatgtgttacctcagaggagaccgtgggaaaaagctgtttcacaggggtgcctggcttatgaagtgagggaaattcagaccgagttggactcatgaactactgggaccctgtcccatgtcagcaaacagcttttctagctcagcgtttctctctgtggctaactcttttgtgtgatttctgagcccatgctggagtcctcctcatgatgcctgatggtcagacctgtgtggggagacctaatgatggggtgggggtggtcttgagtgtcacacagagtgtccagggaacaggctttgtgactttctctaccccagccccacaacaagatctggatagtgggctgggtcagataaagtcagaatccatggggaagggtatgtgtcctggcagtgccgaggttcgtgcctccaggttagctctcagtttctgcaaatacatttatgttgtgcatgtgctgtttcctggactgtttcatgtccttaaatccttgaacctgtctgcagataatgtcatgagaggtctgcatggaagtatataagggctatctgattagggtgggtgtgttttacatagtgggttttttttttcaccaaacacttttcaaaaaattgtggttgagtgtatatatagaaacacatacatacttatattcattagatgtgagcatatattcatataaatttaatatgtagatacatatgtctataaatatacacatatatgtgtgtatgtatatgtgtatatatatgtatatgtgtatatgtgtgtgtgtgtgtatgtgtatatatatatatatatgtatatatatatatagtgccattttaaccacttaaggggagagagagagagaagagagtttctgctaataccaaatctgggttaaataagggtggtcctatttcctggggttgggcttttgctacatgtgtcaattcctgttggaagtgagctagagaggttacatgcttaaccaatttagagattttctatatgaaaatcatctgtgagcacattgataagttctatcctttcctaggtgaaaagcttggtgtaggattttaaggacttcccattggctgaaggctggcaaatggagtttgccatcctctgactacagccattctgaggactggaaagaataccctgagaagtggcctattttatttctgcaggaaggtactgaggtttaatttatcttatggagtcttcctagattagaaggctttgaggtgtgttgatgccttgccagtgacttagctgcctgatcagcgaacctatttcctttggctacttcatctgttccctttttgatgttccctataatgtatcactgctacttcacgtggaagaaaactgaggataataacctgttaattttttggtgatatttcataggaaatccattggtggtaagaaaatgccttttattttaaatggcagcatgagcatgaagaactcaaaaagcatacttggaatcagtgtaaatgttagctacctttcccttgcttaatttaagtgttattttaataactatttgtttagctgatggagcatctgcacctgaagagagatgttatttagagtgactactgcttatcctaccttatgtatttcttgctttaccagctgattgttagctaagagctccctctagaggaaagtaattttgccacattaagtggaggtgtaaaccgttttttcctagggttaatttggaggcttttctgattagtagagctattgtgacagtggtttggaagcagatgtaaaaaataggtcctcctaactgcaaataagaggttgagaaaaatattggattagaatttttcctgagacaccccttatggttgtgctatgggaagaggggaggcctggataagaaaggagaaaagagagagactggatctagtgtttagaaggaggtctactttccttcctataatttccagaatcacctgtgtgtcctgtgctgtaatggcagtttgagctgctggggccaggggtttgagccccaggacccatcagtcctgctggaccactgtgagactggttctgaacccagtgacctccatctctgggagcagttgcatctccagcggtctccaccacaggctggacagggtcaaggtggcttcctcttgctgtttggacactccttcctcaaatgccctggcttgccacaccgagagcaactagtggatacacctctgggatcctggacttgcaactctgcaaagcagctactagaggctttgtccttctcttgagcattctctctttcttctgggccttctcctagtccctattataaaagactgaagtggctacccttagaaggttttccaaggtgctatctgctactatagcttgccttttataggttccttctaatattgggagctttctgtataataaaacttatcttttggaatgggctgtcacttgactgaatcaggagataaaaaggtgtgcactaatagtgcccctctcaacctatccataaaggctgcaggattctcatctggctttgagtctatcatagacagtttagaagaattaagaggtctggccttagtttttcttttccattgatctgcagagctattggggtttcaatcagggttgtcaagaggtactgcttcacttcttatttggagtggtgtttctgctatttcttcactttctgtatctccttccttcccttttggtgtattataggagatatgttgctcatctccaaaattctctgctgcttgcagagctgcctgtttttcagctacagttagggtttggcttaggagcagcataacatccttccatgtgaggcgaaacacctgacttaaattctggaaagcttctatatacctatcaggattgtctgaaaattggcctaagtcttactttatttgcctaaggtcctgtaatgagaagggaacttggagggaccccaaattatggagattcttctcagatggttcccttggaagttgcttttctaatatgaggggattattctttataggccttcctgatatggctgttaaaaaaatctgggttgctgttacaatgcttgtaaaggtttagtaaaaatgccctgtcattgtacaaaatagaatgagttgcttttctcttgaaagtcctgaggttaaaagagttctagtgcctcagagtgcactccagaggggtgcaagctgaagatgctctgttagccatctagaaaaagaagtgagaatgaaagtgtccttatagtcctccttctttcattgtgacccacagtggagtggaagacagtgggagcgtccccccaaatgttttctctccttggttcctgagtcctggcactgtcttaaatgtgccgcccatggttgtaggtgtggccctgtaagccatggaactggataaatgaagtgatgggattagccacactttacccatgcaaccttagcttatctgcctgtgatctgcctggcttcctgaaaaatggatctctggagaaactgtagcagttgcctttgagcaagctttctttaagagagggaatgtgccagttgccagttatggcccgtgctaaaatatttaccctcagaaaagtggtcctggttaactctgttcttaaaatatccttactaattaaatactgttctaattggagatagaataagtaccttaaatgaacgtagggacctaatggcagtttttcctgctgatgggacaatattggaactaaaatttggctatggaagacattttacctctaactgttgaaagcagagttttcccattcacagaaagggcttttctatcagtgcaaaaagagacaattggaaaagtgcagtgttatggcaaaggaccaacgatgtgcctcatgaggaggatttctgtttccactaggtgacactgttggcttagaaataccatgtgcttaccaaaggaaggagagagagacagagagagagggaggtacctattgggttagttattatagcatgtaccgatccttcctaacagaagtgtttccctgaactgtaaaaatttctacatattgcatacacagaaagaataggagacatagagacaatggatagaaaggaagaacaaatttgcaacaggatagcaaattaggagacccattaccaacatctggatgggctgtcggaggctgtgttcagtccagaggcctttgaataacatcagggtgtgtcctggccagaaattctcagctgctccaggacatcccccagcctcatgtgatggtgaggttctccatgaaaggaaactagttggaagagaaccttgaaattaaaggacagatttgaggtttgctccatactcaccattctgatgtttctatcttctcttctgatcacaatcccagatgagaactcccaaataaaatggctctgtttggtaatctatccattgttctttgtcacacactgaaaaagaattcaggacatggaaacacatgaggagtgggtttaggagtgaaaaatttaacagacaaaaaagaagagagagagaaaaagctttctcatattgagaaaacagtcacccaagagaaggtctccaatttggggtggaatgtaattgattttgtacagagacttaaggaggcagtgattgatttacatagggtccaggggattgttttgaccaggtgtgccgtttaaatagcccgagaaaagactggccctcccaccctaatcttttattatgcaaatgtgacttctacctggtggtcaccatgacacctgcacatgtggtgacaaggaaaaaagggcaggaaccgccatattgggagtacctggctcttagttgcctgcagctatatatgcatatctgtgcttgcagcctgatcattcagtctgttttctgttagaaatggtttgggggctgctttttattaaaggaaaattccaccaagaattcttttaccctttctagctgcctaaaaataatttctcgataactcctgtattaggacccctttaggaaaacagaaaagatgacacagactctcctgtaggggagtaaccatagttttttttctcatggaaccccaagagttgcaagtgaacggatttctctcaggtctaaaactctgctcttttctccactgtgttacctgacctctttgcctgttacattactttgtactgtaaaagtatttgaccttgtgtgtgtaatggttgctgggtcagtgataggagctatggttttgaaggtgactaacagtggttataataaattattctagcttcagaggactactcatttctttgtatgtttagatgcaaaagacacagtttaaacaattaaggaaatacctttgtagcaaagtactctgtggaagtgttgcaaagtatggtccccattgcattttcctcttcttggggacctgggattcagtgaaatccttgatttttaatgtctaaatgttgtcccttccaactggttctcttttttacatatttaaatgattagaatctaaaaattgaaaagactttgttggccctcttccttaatgggctctatcttgagcacagtgattcagttgaagaacagagaccaaattaaaagctacgtctctaaataaaaaacaggtgctgcagaggatgtggagaaataggaacacttttacagtgttggtgggactgtaaactattccaacccttgtggaagtcagtgtggtgattgctcagggatctagaagtagaaataccatttgacccagccatcccattactgggtatatacccaaaggattataaattatgctgctataaagacacatgcacagatatgtttattgtggcactactcacaatagcaaagacttggagccaacccaaatgtccaacaatgatagactggattaagaaaatgtggatcatgcacaccatggaacactatgcagtcataaaaaatgttgagttcatgtcctttgcagggacatggatgaagctggaaaccatcattctcagcaaactatcacgaggacaaaaaatcaaacaccgcatgttctcactcatatgtgggagttgaacagtgagaacacatggacacaggaaggggaacatcacacaccagggcctgttgtggggtgggaaaaggggggagggatagcattaggagatatacttaatgttaaataatgagttaacgggtgcagcacaccaacatgacacatgtatacatatgtaactaacctgcacattgtgcacatgtaccctaaaacttaaagtctaataagaaataaataaaaccccatggtaaatttctattatttttgtgttaccttggcatctttttaatcttccttgaacacaccaaattttttcttgaaaaagcttaagttctctctctctctctctttgctttgagatgtaaatgtgctatgtattttctctaaaacttggtaaagccctcctcagataaatgttaacctttaccatttacaagaaagcaatttgaatccaactatcctttaaaatgatgggttttactgatgtcatacctaaagccctaaaatcaaaattctaaaatctttttgtctctatctttatgtgaacatatatatgttatatattttatcacatacatgtttatgtcacacatttatatactgttgacacatagtatcaaattaatgtaaaaataaatgggtacatacaaattaagtgaataagcccaaatgcttttctatacatgtgattttagtaacctttggtgaatatagatagttttaaaattgttggtaaaataaagtagaaatgtcttcataatttaatttatacgtttttgcctatgtctgttggcaggcaggtttatattgtctttactagatgttttaaggtcatcaaagagttgcttccatatatatacattttcttaatttgtctgtgagcttatgtctttatatttgaagctttaaattctgagttctagatgagtgaccatagtaagaactggggacaaaacccatcccatcctccagctgtgccttttggccatgctgggagaggtgggattatccaggcattttcttcatagctctgttctttgtcttgggctttgcatctggtacatagttagaatgatttactccctagttttttttctactgagaataaggctgtgtaagtctgtttttacattgctacagacaaatacatgaacctgaataatttataaagaaaaaaggtcgaatggtctcatgattcagcaggttgtagagtaagcatgattctggcatctgctcagctttcgaggagccatcagaaaacttacaatcacggagaaagccaatggtagaggaagacatcttatataatgggagctggaggaagagagcaagtgttgcacactggtaaacaaacagataaaaactcactgttgctacaacagcaccaaggagaagggccttaaaatatgagaaaccacgtccatgatccaatcacatccaaccaggctccacctccaactttggagattacaatttgacttgagatttaggtgggggtaaagttccaaaaaagtattattctctccatcatccctcccaaatctcatgtctttctcacatttaataatataagaatggcttcccaacagtctctagagtcttaactcactcagcattaactcagaagtccaaaatagcaagtttcatctgagacaaggcaagttccttttacgtatgagcctgtaaattcaaaagcaagttagttactttcaagacacaatggaagtataggcattgggtaaatactcccattccaaagggaagaaataggctgaaggaaataagatacaggccccatgaaagtctgaaaccttgcagcacagtctttaaaatttaaagctccgaaataatctcctttgaccccatatctcatattcagggcacactgatgtaaggcttaggcttccaaggttctgggcatcacaggaacattccaagagagtcacaaaagaatttgtagtgtggcttttgatgctaaacagtgtattagaccgagtaagtcactgaagagaaaaaagtcagaggagaagatgggtgagggtgacagaaatggaatggtgaaaggaaagttctgacaaaaatgtttatcggctgggcatggtggctcacgcctgtaatcccagcactttgggaggccgaggtgggcagatcacgaggtcaggagtttgagaccagcctgaccaacatggtgaaaccccatctctactaaaaatacaaaaattagccagatgtggtggcacacacctgtaatcccagctactcaggaggctaaagggaggagaatcacttgaacttgggatgtggaggttgcagtgagctgagatcacagcattgcactccagcctgggtgacagagtgagactccatcccaaaaaaaaaacaaaagtttacccaggggctcatctggtaccttgctctgtgactaatatcttacacattttgatttactcttccactttcattttctgatgcgcaaagtgtcacccttctgctgaagatgagaaaagaggctgagggagccaaatgagtggtctagagtcatccagctacttcatagagtttgtgtcttttaccttgacgtttgtgcacagacagaaaagtgagacacagaaggaaggcaaagcaagtttttgttgtgggtgacatttatgaaagttacctgtgttggcagaataatggactcctaaaatgtttgcaccctagctctggaacctgtgcatttacttttcttggtaaaaacatggtgcagcggtgataaaattaaaatcttaagatgtggacgttgttctagattatctgggtgggcccattgtaatcagaagtgtccttgtaagtgacaaagaaaagcaggggggtcagtgtgagaatgatgagcctgtgagactccactggccaatgctgggtgtgagcatgcatcaaaagacaaaattacaactaatgtagttatagattttatttttcatttattatttgaggcagctctcactctacaaatatagtgacagccctccctgagctatacaataacaaaacagtgggttttgtcaagtgggaaccagtaaacaaagccatataaataaataaattggtgaacattagggtacttcaggtctcttttctgtaaaagttaaagcagaggaaacttttattatgctatctcaggtagagtggaatctcctcttttcaacaaaaaacaaaggtctgttctggtatctctttgcttcattaaaatttcagttgtagactgtagcatttagcaggagtggttctattttggagtctctaggctctcacttaggtgagagtgtgaccaaaatttaaagcattggcattcatctcagtaaccatcatattgggcttccatcatttataagtttatgatgtcttcctgatcacacatttctttgagtttttgtcatttcagccaaagagagaccctttggtatttgttgatggctgcacacaaaactttttaaaaacttttgtagaattcaccacaccaaaatatagaattttaaaacctatagaatttatcacaccagagatgctactagtatgactatcaggaggataacaccaaaagtttggagtatgcactttaggcaagatgcaaaccaagtaaaatagaatagatcaaagaatgagccagaagagtctagcaattttaaccaagtagtatgtttggtaacttctgtgattgagtcattattatactcgatgtatttctttatgtgcaacagtcagtgtcagaaactgcacaggctcctccctgttcagctggtagggaacaattttattatgtagcattcgacggctcattaaattaaaacagggagtgagaacaagtgagtctgaaaatgtaactttaaaagggaccactgtacatttgaagaaacaagtgtgttaaagatgctgctaatgtcagccgttgggtggactaaatgatatcttatgtaaaaatttgagggtgacatgatatatctgtcactctgttacgctactctcagaagctacttcatgtgaaattctaatgataccatcatcgtgccacgtgaaagaggcaggcataagcatggacaaattaagagggctaagagcctgattttgatgtggagacttgttctgacaacttgggaaaagcttttgacagtgtgaagttgtcaacttcttatcctggttttaagtttgagtgtctgtagttatggtgtcaaacatattggtgagctctgagtgactcatacctcaggcacgagggttttcccgtgaaatttacattgagctttccacctccaacttatagggcttcaggaacaaagcagattttgttcttactgattcaataagagaaaactggatgggaggaaatagaagaattcagggtctagtccagtctaccggtgaataataaaaactcaaaaacaatgaacagagctgcaatttcatagcaggtatactacactttttattttcaacattatttttctctctataggcatatctatttttaccaaagagaatcccagtaggacaaattcgtttccaaagtaggtttagtcttatcagactttgccgggattctttacataagtgcatcaagagtaacaatggaccacagaggctcttcctaaagtttgcttccctagaagtttttataaggagtctcagattaaacttttacaagcctcttgagatgaggaagccaaatgaaggccatcttcagcctttgcatgcagtacttatgggtccattctatgtatattctcaaatataacatcttagtcaaagccttggtaatataaccaatgttttgaaacgtgtccttttgtaaagagagaagactcttactaaacttgtgcaaataactgtattagcataatcatatgaatactcatgaatagtttcccaatcctgggacagttaggaaaagagcaaaaataaatgggcttcaattattgtttccaaaagtatactttaccaaattgctttagatatagatagcttaaaagaagaaaaattccataaatctggaaaaaatcatttaaagaatcagcaaattttcaaataaaaattataaaaacattatccacattatcatttatttcaatgaaattatatttgttctgcttggtctcagtgggcatatttcatgaaggcatcaacctgtttgttaaagttttggaagtctatagacagtccagtgatataaccttgaactgctcagaaacttgtatgcaagagtacttgtcagtatcttttccataaatcttttgaaatagaagcaattttggactgtagctgattgcagatgctttcaggaagaatcaaaacaactatctgtgaattaccaacatgtaaaatgactattgctaaaactctgataagagtttggtataataaagagagtaactctggccagtacaccagtcatgatgctgacagtggccccaactgagagaccaaaagaactttcttgtcctgaagcagctgtcatggaaaaaaaaaaaaaaaagaagagaaggaataaattataaagacagcaagggttttagccaattattttttgagatagggtctcactctgttgcctaggctggagtgcagtggtgcaatctcagctcactgcaacctgtgcctcccaggctcaagcagtccccccacctcactctcctgagtagctgggactacaggcacacaccaccatgtatgcttaatgtttgtattttttgtagagatgggcttttaccatgttgttgaggcttgttttgaactcctggactcaagttatccacccgccttggcttcccaaagtgcagggattacaggtgtgagccaccgctcctgctggtttcatgctttttataataagaatgaactccttatgtaataataaataaaaagaaattatttgctttggatgtagcaaatgtagattgaccagagtcaggagctaagcctcatattttttttggctttagctcagtgtagagtgcattgaaggtgtcccaaaaataattccatatagtaagccaactttaaaccctgctcacagccagatctgccaagtatgagccaggtaaaattaccaaaaagggtggttctgactgactccttaacaataatgtggcttacaaacaaagactgatatgaaatagtcgatccaacccaaacactttgctcatttcccaaaattttctatacaaacatatacaacttatcacaacataaagaacataatgaaaggtttgccttttattcgtttaaatgaccatatgtttagatctgatgtactgacagcgataattctccattaagcagaaacctaataaaatttgaaaaatagtgattttatctttagatgatactcagatcttctgctacatatgtggaaaatggaattattgctagaaacattgtttaaagattagggtatgaaaggagtattaggaagtcaggaggttctttctttaggaagcagcttatctggattcattcaaagagctttatgcgagtttgaggtctttctgcaaaatgtaaattgctatctgagaaaccatatatagtccaatgatgaaagaatgcaaagccttagaagcaccggagacaattccagtatcttccctaaagttctgacaaaaaggaaaataactatcaaattattcaactcgaatgcttattatgtatgtataagtcagttggcagacgaagagaggagggaaatatgacttctacccctagggaacacatagtcttgtggggccactaggggtggtggtgtgacctgcctggagcagcgctaaatatggacttgtgagtgaagggctatcaaaacctaagtaaactgattgccgttcagagaaggtagagttccattccacagtttgcaagaaggactatttcatggaggaggtcatgttggactagaccttaaaaagttggtagaatttaaaagcaaggatatggaagcaggaagagtgaaagtgagcagaggtacagaagtgaggcaaggctgagcagtgttaattttttaatggtggtattataaaacacacatcaaaatttgccatattattattattattttgtagacagtgtctggctctgttgcccaggctggagtgcagtagctcaatcatggctcactgtagcctccacctcctgggctcaagcaatcctcgtacctcagcctgctgagtagctgggaccacaagcatataccaccatgcccagctaatttttatatttttgggagtgacgagttcttcctatgttgcccaggctggtctcgcactcctggactcaaatgatccacctgccttagctccaaagtgctgggactacaggtatgagccactgcacctgaccccatcttaaaaatttttaagtgcaccgtttagaaatacatttgcattatgcaaccatcagcgccacccatcttcagagagtatttttcatcttgtaacagggaaaattcatatccatgaaacactaactcctcattcttcctcctccccaccccaggtaacaactatttcagtgtctctatgattttgactgctctagggacttctataaatgagatcatacactgtgtatctttttgtgacttagcataatgtcctcaaggttcattcatgttgtaatatatgtgagaatttttttccttttgaaggctgaataatatttcactgtatggatagaccacattttgtttatccattcatctatccatggacaattgggttgccttcactttttggctattgtaaataatgctgctataaacattgaggtaccaaaacctgtttgggtctctgctctcaattattttgggtttatacccaggagtggaatggccaggtcatacagtacctctagttttagttttctgaggaaccgccataatgtttttcacagtggttgcaccattttaattcttatgaatagtgcacaggggttccaattgttccacagtctcattaacacttattattttctggggtttttgctttgtgtttgggagtagccatttaaattggcataaggtataatttcattgtggtttgcattttcatttccttaatgattagtgatattgatcaatattttatatgcttgctggccatttgtacatcttctttggagaaatgggagggacagatccctcccattgaatagattaatgtcctctcctgatggtgaatgaattcttcctctattagttcctgcaagacctggttgttaaaagagcaggccaccgccccggtttctctcttgctcccttgctcatgtaatctctgcacatgttggcttcccctcctcttctgcgatgagtgggagcaggctgtggccatcaccagatgaagatgcccaattttgaactttccagccaccagaatcataagccaaatcatcccttttcctttataaattatccagcctcaggtattctttatagcaacacaaaagggacaaggactttttatatcttgccccactgtcttctagcatttcatgtgtcacataaagaaatcttagcctcctaggttttttttttctgaatatccacagaattctttccataacttcaaataccaggaatttattggggtatttgttaattattcaatataaacacagccttgtaattcttgggctatttctgtctgcagattcaaatttcactgtatttcaggaatttcaccttgaattgtatctttgaaaatttgttttcatgttccattcattttttaacccatgcaaggcatttggtgttaatgatatttgatctcttccctaccacccctcccatccccctctttttctctatctctgtcttccgtcttttactttttgttcttttccatctcacatgctcattttttcttctcaaaaccatcctttgaattccttcagtggtgtctcatctcccttttgctgcttctatcatgacctttgattttagtctctttttgtgtgtctctctctgagattctgaggctctgcctattctgtttttattctcatttgtttctaatttgtttccaagactctgtctactcccttttcattctcatttattactaatttatttctgaggctttacccacccacttttcattcccgtctaacctaatgtattatcagttcttccttaaagccttatattgcttctttaaattctcatttcagagaaacaatattgtctttaattgattccttagaaataactttgttcatggtttttggctgcgttgtggtatataatctttctgtttctcatcttcataaatcatgttctgttcttcttttttcatttcagcatcattttaaaggcccccggctggctccaccctttttaagtagcattgttcctcatctttttggactagaattttgggcaaagttctggtgaaaggggaagaggaatgtgctaaacaaatgggaagattgggtttcaatctgttatctctaggatgtttctcagctggacttggcctgtgggttatctggtccagcatagcaggacatcttccaggctcacaaggaggttgtgcattttacagaacattttaatgtgattattttaccttcacttatcttcaccaggcagctttgggcaaagacggccaggtagcttttatcttattgactcttccttctatcctataccatgattgaaacatgatgtaggcttccaaaaccaggccatgaaccttgatcttaactttctaagcatgggatagacacatttcctttcaatgtgtgccacccatccactttggataactatgagctgggtcaactgtgcctgagtcacacatagaaagacaccttctcttggagttcccaaatacctccatccacttctcatacacttggctgtcttcctgcatctacagtgatccagtgttataggggatctgtagcttcatcaaagataacatttgtttgtttctccttctcttgtttgctttggattggtttcataaaggaaatgagacgaaaatatacttatactacgattttaaaagaaaagataaattccttctttcaaattcattcctttttgtttctttccaatgaatctcatggggtgaggggaggactgaagagaatgtccaatctactcaaatccaaaaagtcacaggtataaggcacagaaaattttaccagtctaatgatggcagttttaatgctatataaggacagactatgcaaaaatgctattaatgaggatgaggagctacaggaacaaacctgatgaggaactgtaattctattagagggatgtatatagccatcatttttttctttaatccaaaacaattagattgcttatgtagacagccacatgctatttgattgaaatgcaccagaggatgcagatatatatatatatccttttaccttaatttccattttattctttctctcccttttttttcatttattattatactttaagttttagggtacatgtgcacattgtgcaggttagttacatatgtatacatgtgccatgctggtgcactgcacccactaactcgtcatctagcattaggtatatctcccagtactatccctcccccctccccccaccccacaacagtccccagagtgtgatgttccccttcctgtgtccatgtgatctcatttttcaattcccacctatgagtgagaataggcagtgtttggttttttgttcttgcgacagtttactgagaatgatgatttccaatttcatccatgtccctgcaaaggacatgaactcatcattttttatggctgcatagtattccatggtgtatatgtgccacattttcttaattcagtctatcattgttggacatttgggttggctccaagtctttgctattgtgaatagtgccacaataaacatacgtgtgcatgtgaatttatagcagcatgatttatagtcctttgggtatatacccagtaatgggatggctgggtcaaatggtatttctagttctagatccctgaggaatcccacactgacttccacaatggttgaactagtttacagtcccaccaacagtgtaaaagtgttcctatttctacacatcctctcctgcacctgttgtttcctgactttttaatgattgccattctaactggtgtgagatggtatctcattgtggttttgatttgcatttctctgatggccaatgatgatgagcattttttcatgtgttttttggctgcataaatgtcttctgttgagaagtgtctgttcatgtcctttgcccactttttgatggggttgttttttttttcttgtaaatttgtttgagttcattgtagattctggatatcagccctttgtcagatgagtaggttgtgaaaattttctcccattttgtaggttgcctgttcactctgatggtagtttcttttgctgtgcagaagctctttagtttaattagatcccatttgtcaattttggcttttgttgccattgcttttggtgttttagacatgaagtccttgcccatgcctatgtcctgaatggtattgcctaggttttcttctagggtttttacagttttaggtctaacgtttaagtctttaatccatcttgaattgatttttgtataaggtgtaaggaagggatccagtttcagctttctacatatggctagccagttttcccagcaccatttattaaatagggaatcctttccccattgcttgtttttctcaggtttgtcaaagatcagatagttgtagatatgcggcattatttctgagggctctgttctgttccattgatctatacctctgttttggtaccagtaccatgctgttttggttactgtagccttgtagtatagtttgaagtcaggtagtgtgatgcctccagctttgttcttttggcttaggattgacttggcgatgtgggctcttttttggttccatatgaactttaaagtagttttttccaattctgtgaagaaagtcattggtagcttgatggggatggcattgaatctgtcaattaccttggacagtatggccattttcatgatattgattcttcctacccatgaccatggaatgttcttccatttgtttgtatcctcttttatttccttgagcagtggcttgtagttctccttgaagaggtccttcacatcccttgtaagttggattcctaggtattttattctctttgaagcaattgtgaatgggagttcactcatgatttggctctctgtttgtctgttgttggtgtataagaatgcttgtgatttttgtacattgattttgtatcctgagactttgctgaagttgcttatcagcttaaggagattttgggctgagacaatggggttttctagatatacaatcattccatctgcaaagagggacaatttgacttcctcttttcctaattgaatgccctttatttccttctcctgcctaattgccctggccagaacttccaacactatgttgaatagtagtggtgagagagtgcatccctgtcttgtgccagttttcaaagggaatgcttccagtttttgcccattcagtatgatattggctgtgggtttgtcatagatagctcttattattttgaaatacatcccatcaatacctaatttattgagagtttttagcatgaagcgttgttgaattttgtcaaaggccttttctgcatctattgagataatcatgtggtttttgtctttggctctgtctatatgctggattacatctattgatttgtgtatattgaaccagccttgcatcccagggatgaagcccacttgatcatggtggataagctttttgatgtgctgctggattctttttgccagtattttattgaggatttttgcatcaatgttcatcaaggatattggtctaaaattctctttttttgttgtgcctctgccaggctttggtatcagaatgatgctggcctcataaaatgagttagggaggattccctctttttctattggttgaataatttcagaaggaatggtaccacttcctccttgtacctctggtagaattcggctgtgaattcatctggtcctggaccctttttggttggtaagctattgattattgccacaatttcagctcctgttattggtctatatagagattcaacttcttcctggtttagtcttggaatagagtatgtgtcgaggaatttatccatttcttctagattttctagtttatttgcatagaggtgtttgtagtattctctgatggtagtttgtatttctgtgggatcggtggtgatatcccctttatcattttttattgtgtctatttgattcttctctctttttttctttattagtcttgctagcggtctatctattttgttgatcctttcaaaaaaccagctcctggattcattaattttttgaagggttttttgtgtctctatttccttcagttctgctctgattttagttatttcttgcctcctgctagcttttgaatgtgtttgctcttgcttttctagttcttttaattgtgatgttagggtgtcaattttggatctttcctgctttctcctgtgggcatttagtgctataaatttccctctacacactgctttgaatgcatcccagagattctggtatgttgtgtctttgttctcgttggtttcaaagaacatctttatttctgccttcattttgttatgtacccagtagtcattcaggagcaggttgttcagtttccatgtagttgagcggttttgagtgagattcttaatcctgagttctagtttgattgcactgtggtctgagagatagtttgttataatttctgttcttttacatttgctgaggagagctttacttccaagtatgttgtcaattttggaataggtgtggtgtggtgctgaaaaaaatgtatattctgttgatttggggtggagagttctgtagatgtctattaggtccacttggtgcagagctgagttcaattcctgggtatccttaactttctgtctcattgatctgtctaatgttgacagtggggtgtaaagtctcccattattaatgtgtggtagtctaagtctctttgtaggtcactcaggacttgctttatgaatctggatgctcctgtattgggtgcatatatatttaggatagttagctgttcttgttgaattgatccctttaccattatgtaatggccttctttgtctcttttgatctttgttggtttaaagtctgttttataagagactaggactgcaacccctgcctttttttgttttccatttgcttggtagatcttcctccatccttttattttgagcctatgtgtgtctctgcacgtgagatgggtttcctgaatacagcacactgatgggtcttgactctttatccaatttaccagtctgtgtcttttaattggagaatttagtccatttacatttaaagttaatattgttatgtgtgaacttgatcctgtcatgatgatgttagctggttatttttctcattagttgatgcagtttcttcctagtctcgatggtctttacattttggcatgattttgcagcggctggtactggttgttcctttccatgtttagcacttccttcaggagctcttttagggcaggtctggtggtgacaaaatctctcagcatttgcttgtctgtaaagtattttatttctccttcacttatgaagcttagtttggctggatatgaaattctgggttgaaaattcttttctttaagaatgttgcatattggcccccactctcttctggcttgtagggtttctgctgagagatctgctgttagtctgatgggcttccctttgagggtaacccaacctttctctctggctgcccttaacattttttccttcttttgaactttggtgaatctgacaattatgtgtcttggagttgctcttctcgaggagtatctttgtggcgttctctgtatttcctgaatctgaacgttggcctgccttgctagattggggaatttctcctggataatatcctgcagagtgttttccaacttggttccattctccccatcactttcaggtacaccaatcagacgtagatttggacttttcacatagtcccatatttcttggaggctttgttcatttctttttattcttttttctctaaacttcccttctcgcttcatttcattcatttcatcttccattgctgataccctttcttccagttgatcgcattggctcctgaggcttctgcattcttcacgtagttctcaagccttggttttcagctccatcagctcctttaagcacttctctgtattggttattctagttatacattcttctaaatttttttcaaagttttcaacttctttgcctgttgaaacttttttcaaagttttcaacttctttgaatgtcctcccgtagctcagagtaatttgatcgtctgaagtcttcttctctcagctcgtcaaagtcgttctctgtccagctttgttccgttgctggtgaggaactacgttcctttggaggaggagaggcgctctgctttttagagtttccagtttttctgttctgttttttccccatctttgtggttttatctatttttggtctttgatgatggtgatgtacagttgggtttttggtgtggatgtcctttctgttagttagttttccttctaacagacaggaccctcagctgcaggtctgttggagtaccctgccacgtgaggtgtcagtgtgcccctgctggggggtgcctcccagttaggctgcttgggggtcaggggtcagggacccacttgaggaggcagtctgcccattctcagatctccagctgcgtactggaagaaccactgctctcttcaaagctgtcagacagggacatttaagtctgcagaggttactgctgtctttttgtttgtctgtgccctgcccccagaggtggagcctacagaggcaggcaggcctccttgagctatggtgggctccacccagttccctcttccaggctgctttgtttacctaagcaagcctgggcaatggagggcgcccctcccccagcctcgctgccgccttgcagtttgatctcagactgctgtgctagcaatcagcgagactctgtgggcataggaccctccgaaccaggtgtgggatataatctcgtggtgcgcccttttttaagcccgtcggaaaagcccagtattcgggtaggagtgacccgattttccaggtgccatctgtcacccctttctttgactaggaaagggaactccctgaccccttgtgcttcctgagtgaggcaatgcctcaccctgattcggctcgtgcacggtgcatgcacccactgtcctgcgcccactgtcttgcactccctagtgagatgaacccggtacctcagatggaaatgcagacatcacccatcttctgtgtcactcacgctgggaactgtagaccagagctgttcctattcggccatcttggctccttccccagttgttttttttttaatctgtaaaaacggggatggtggcacttgggatttttttttttttttttttttgagacggagtctcgctgtgtctcccaggttggagtgcagtggcgcgatctcggctcactgcaagctccgcctcccaggttcatgccattctcctgcctcagcctcccaagtagctgggactacaggcgcccgccaacacgcccggctaattttttgtatttttagtagaaacggggtttcaccgtgttagccaagatggtctcgatctcctgacctagtgatccgcccgtctcggcctcccaaagtgctaggattacaggcatgagccaccgcgcccggcccgcacttgggattttttggtgaggactgtagttacctggaaaggccttaggatagtgcctggtacatagtgagtgctgcatcagtgtgagctattataattatgggaatagacaaaggtgccaccctggccatccagagtggggaggtattttccagtcagggtccaggcaggccagctggagatgaagctgattagtggggaagcttaacttccaggagtggaagaatttaggaggagtaaacagaatgcacaacattctgtaaacattcctttacccaacagtaggaatgctcatagtgggtgtggcttccgtgacaatcattatctcttgggaatttaagaatgtgtcctagagtcaaatggctttgatgtaagccaaacccagaaatgggcttcaggtctgccttacacatagcattcattcatcttgaaaaaggaaagcattcatcttgctaaaggaatcccctcttctggcccaggtcattatttttgtttttgtactgtcctaatttttaaggtgtaaggagaaagaccaaagaataaaataatgaagtacatgtatgaaataacagggtagaattgagactggtacgtgtaagttaagagaaattgtgtataaattttgtgtgaatagaaaaaggatttcttgttgcaaacagacctctctatataaataatacccattgccttcagtggatagcagactgcatcacaagaacattccagcagagtcacgagagaatgggtagtgtggcttctgtaattggcaggttagacagagtaagttactgaagagaaaggagttgaaggagaagatgggtgagggcaagaaaaatgggaaggtgaaaggaaagaactgaaaggaatgtttaccaagggctcatcaggtaccaggctctgtgattaatgtctcacacatgttaatttactcttccactgtcattttctgatgcagtaagagtcagtcttacactgcagatgaggaaagaggctgaaggaggtcaaacgagtggcccagggtcatccagccacttcatagcagagctagtgtgtttcactgtggtttgcgcagacagaaaagtgagacatggaaggaaggcaaaacatttttcttgtcggtgatgtttatgaaagtgacctgtatgaggcagaataatggcctcttaaaaatgtccacatccaggtcgggtgcggtggctcacgcctgtaatcccagcactttgggaggctgagatgggcagaccacgaggtcaggagttcgagaccagcctggccaacatggtgaaaccccgtttctactaaaaatgcaaaaattagctgggtgtggtggcgggcgcctgtaatgccagctacttgggaggctgaggcaggaaagtcatttgaacctgcgaggcggagattgcagtgagcccagattgtcccactgtactccagccggggcaacatgagtgaaactctgtctcaaaaaaaaaaaaaaaatccacatcctaactcttggaacacatttacttggaatgcatttacttttcttggcaaaaacactgttcaaagttgatgaagttgagtattttgagatggaaagcttattctggcttatctgggtggctccctgtatcatcataagggtccttgtgagtgaaagaggaaggcaggagggtcagggtgagaatgatgcagtctgagagactccactggccattgcttcctgtgaacatgtgtgataagacaaaattacaactaatttagttatagatgtaattggcttttatttgtgatttatgatttggggcagctctccctctacagatgcttcagcatcccaagtagctgggactatattgcaggatctggccagcagcctgcaatgcaacggggctctttctttgttcccaggcagattggcaggttgagaaataaaagacacacacaagatagtgaaagctgggtccagaggggtcactgccttctggtcctgcgatgctgccaatgcactggatataccagcatttattattaagtttagtgagagtgggggtaggttagtgagggatttagggtcatttataggctctccgtaagggtcacattccattcccagagctatggacatctgcttttctgggataggaatcttggtaatgtgaaacctccctgactgcatgtccgttcataggctctctgcagggggaagcacatcacgtgctgttggctcattctggcagtccaacctggcatttgtctttacacaatcctgcatgcaactttgtatttacaataatcaggagcatttcatctttcattccgtagcaatagttcaggggttctccctacatctctgcttttctctgatttaaatgaaccatagcaatcatagcttggcactgatcacaattggattgaagaacattttttccaattttacacatgaacaataaaccaacagcacaaattatacacagaacaaaattaacgatagtggatcctcccaaagattttacctattgaatggggttgagattagataacccctcagagatactgtctaaaacttcagcactgggtaaagcagttaagtgtgcttgagaagcttcaaaaatctgttctttcagcttgcttatgtctaaacttaaattatcttcacttccttgtaaatggcatattactgattcccgattgtgaccagactctttatattggaacagagttttacaaaaatcagaagtgttccaatcaggttgcatttgtaatctatgttctaaactcataattctatctcccatccatgtaacagaagcacatcccgtgctgtaggctcattctcgcagcccaacctgtcattgtgtttacacaatcctgcgtgcaattttgtatttacaataatcaagagcatttcatcttttattctgtagcagtagtttctgggggtctccctacaggactgcaggtgcacgccaccatgcctggctaatttttgtatttttagtagagacagggtttcaccatattgatcaggctgatcttgaactcctgaccttgtgatctgcctgccttggcctcccaaagtgctgggattacagatgtgagccactgcacccagcccataaatcacacatttctttgagtttttgtaattccagcacaagagaaaccgtttgatatttgaagaatggctgcacacaaatatttgcacagaaataaaaacatctgtagattccaccacatgagggagaataccagtatgactatcaggaggaaaatatcaagagtttggaatatgcaccttaggcaagatgcaaaccaactacaataggatagatcaaagaagaagccagaagagtctagtcattttaaccaggcagcacatttattgatttttacaactgagtctctataatacccgatgtatttatccatgtgcaacaagaagtgtcagaaactgcacagactccccgctgtccagctggtagagaacaattctattatctagcattgcatgtctatgttaaattaaaacagggagtgagaataggcaagtatagaagtggaagcctaaaaaaaactccatacatttgaggaaaaagttgtgttacagatgcagctaacgtcagcctttgtgtggactaaaggatgtcttgttatgtaaaaatgtgtgggctgggtgcggtggctcatgcctgtaatcccagcactttgggaggctgaggcatgcagatcatctgaggtcaggagttcgagaacagcctgaccaacatggagaaatcctgtctctactgaaaatacaaaattagctgggcatggtggtgcatgcctgtaatcccagctactggggaggctgaagcaggagaatcacttgaacccaggaggtggaggttgctgtgagccaagattgtgccattgcactccagcatgggcaacaagagcgaaactccatcttaaaaaaaaaaaaacgaagtgtggttgacatgatatatctgacactgttaacttactctcagaggctatttctggtgaaatcctaagtacagcattattctgggaagcaaaggagacaggcaaaagcaaagacaaattaagagaggtaagagtctcatcatgactgatagtcttgttctgacatcttgagaaaagctgtccacagtgtaaagtcatcagcttgtcgtggtttgcagtttgagtgtctctaagttatggtgttgaacatttggtgagctcttagtggcccccacctcaaacacgagggttttcccatgaaatttacattgagttgtccacctccaccttatatggcttcaggaacagagccgctcttgttcttaatgatttcattggagaaaactgaattggaagaactaaaagaattcagggtccagtccagtctaccagtggattataaatactcaaagataatgaacagtggttcaatctggtaacaggtgtactacagtttttcttttcagctagtttttctctctatcggagtctctatttttaccaaagataattccaataagatgaatttgcttgcaaaataggttgagtctcaccgaacttgcccagattttttacctaagtgcggcaagagtagcaatggaccatagaggctctttttaaacttctctttgctagaagtttttaataagaatctcagatgaaacttccaaaaacctcttgagactaggaagccaaaccaaggcccacttcagactttgcctgcattccctatgggtttattctatgtatattctcaaatataacatcccagtcaaagccttggtaatataaccaatgttttcaaatgtgtcctgttataaagagagcagattcttacggaacatgtgcaaataactttattaccataaacctatgaatactcatgaatagtttcacaattctggggcattcagatagacagcaaaagcaaatatttcaatttttgtttacaaaagtatactttaccaattgctgaagaaaaaaagttcataaatctggagaataaaacattcaaagaatcagcacattttccaataaaaaattatgaaaacattatccttttgattatttagtccaataacattgagtttttttcttctttgtcttgaatttcatgaaggtatcagcctgttctttttctcagtgtctcagttgttgcagtcatgactgagactctgtcaggtctccatggcagggacctgattgacagaaggcccaggtcagtgcatttcaaattcactacctcctttacacagaaagcttctttcctacaggctcccaggaagggtgtgaaagcaagcctagttctctgaggctctatttaactctaatgggtggctggttggaggattccccatcagccttgcaaatactcttagaactgcattggtacctaaaacttctttctctttctttttcacaggaatcagctctgcatagtgttctgtgggttctcccatactaccttcatgcctgctccacattccctcacaggtgtcttccctgataaattaccttgtatgtctaatcccatcttggatgcatctcagttggtaaaaactaacataccagacttgattctttgcccttagctttttttttctctcccacaagtagtcagtaaccatgtcctagtgttttatgtgttacctctttttccatatatatggaaaaaggtaggtactgttgaggtgcacttcctatgtgccaggccctgtgctcaatactttacctgtatctcatttaagccacacaataaccctgtcacatagacattatttccattttgccgatgaaaagacagaagcttagcatggtgtaaaaactttcctggtgtcatatggctagtgacaggtggatctgagatttgattctaggactatttgacctcaaggctaatgatgatggtagtaatatagcagctgacattggttccgctgtgtgtggcatattgtttcattgactgcattaaacctttaaaacaatggtaagaagaaagtactctcattgcaattttcaggtaaggaatcagaggttcagagaagttgagtcttgtgcaagaaatttataactgtaaactcttacattaaaaaagaagaaagatctcaggtcaacaacctactttaatacttcaggatatgaaagaagaacaaactaaacccaagcacagtgaatgagggaaataataaagattagagtggatatacataaaatggagaatggaaacagaatagaggaaattaatgaaaccaaaagttgattcttcaaaataaaatcaacaaaattgacaaccattaactagattgactaagaaaaaaagagaaaagtttaaaattactcaaatcagaaatgaaaatggactctgagcatggtgggtcatgttttaatcctagcactttgggaggtcacagcagaaggatttcttgagaccaggtgtttggaccagcataggtaacctggggagatgctgtctctacaaaaaaataaaaaaaaattagctgggcatggtgacatgcacctgtagtcctagcatcttgggaggctgaagaaggagaattgcttgagcccaggaggttaaggctgcagtgagccgtaatcacaccactgtattccatcctgggctggcctacagagtgagagcctgtctctctctcttccaaaaaaaaaaaaaaagaaagaaagaaagaaaaatgaagcgattactaccaattctaataaaataatgatgatgaaagtactataaataattgtatgccaataaattggataacctagatgaaatggaccaactcctagaaccacacaaaaatatgagtataactataatcagtaataagattgaatcaataaaagcatttgatgaattcaatattttttcataatgaaaacatcctaagaatggaaggaaaccacctcaacataaaggcaatatgtgaaaaacccaatgctagcatcatactcaatggagaaagactgaaagctttccctgtatgagcagtaacaagacaaggatgcctgcttttgacacttttattcaacgtagtattgaaaggtctagtcagaaaaattaggcaagaattgaaaaaaagacattcaaattggaaggaaggagtaaaattatttctgtttatagataacttgaacttatatgtagaaaatcctaaagattgaacaaacctaattagaattaataaataaattcagtaatgttgcacaatacaaaatcaacattcaaacatctgttgtatttcaatacactaaccatgaacaatctgaagggaaattaagaaaaaaatttcaatttatattaacatcaaaaagaataaaatatttaggaataagtttaatcaaagaggtgaaatgattatacctgaaatctacaaaatattgctgaaagaaatgaaagatgacatcaataaattgaaagacattttgttttcatgaattggaagactcaatattgttaggagaacagtgctacccaaagtgactgcagattcaatacaattcctatcagattctcagtggcatttttgcagaaaaagaaaaatctgtcctaaaatttatattgtatctcatgactctaaatagacacacagctttgaagaggaagaatgaagctggaggactcacacttcctgatttcagcatttacaatggggaagggacagtgttctcaccaaaggatattgggaaagctggatatccaagggcaagaagattggaacctttacctaacaccatgtacaaaaattaacccacaatagatcaaagatctaaatgtaagagaaaaactacacaactcttagaagaaaagcttcatgatactggatttcccaatgatttcttggttgtaacaacaaaagcataggcaacaaataaaatggataaatcggacttcacaaaaatcaaagcttttatatgtcgaagaacattatcaagaaagtaaaaaggcaacccacgaaatgataaaaatatttgcaaattatatgtgtgataagaaattcatttccagaatacatgaaaagctacaagtcaacaacaacaaacatccaaaaacccaattaaaaaatgaacaaaggattaaaatagagttttatccaagggagatatacaaatatccaataagcccatgcaaagttcctcagcatcacgaatacctggagatatgcaaatcaaacccacaatgctacaccacctcacacaatttaggatggctttgataaacaacaacaatgacaacaacacaaaacaacaggtgtttgcaagtagatggaaaaattggagctctagtgcattgctgatgggaatgggaaatgttatagccactgtaaaaagtggtgtggctgtttctcaaaaaattaaacaataaattaccatttgatccagcaattccacttctggacatactccccatagaattgaaagaaatttgaacaaatatttgtacactgatgttcagagaagcattactcacactagcgaaaaaatggaaacaactgaaaagtccattgaaagataagtgggtaggcaaatgaggtgtatctatacattgaaatgttattcaaccttaacaaggaataaaattccaatacatcatgcaaaatggatgaaccttgaagatattatgctaactgaaataaaccagacacaaaaggataattattatgtaattccatttataaaagatagttagaatagccagttacatagagacaaagtagaatgatgggtgctaagggttaggggaagaaggagtgagagttactgtttattgggtacagaggtttaatatggtaagaggaaaaagttctggaaatggatagtgtgatggttacacaacactaaattgcacacatagaaatagttaatggtaagtcttatattagatatatataaagtgtctggtagtcttaccctctctataattacacactttttggcactgcccctttcctgccatgaataaccccaacggtgaatctccctattcctccagctctgcatcagtcactgtcctccgtgctgtgtcccacgtgctgtgcccaaagcctcatacagctggtgacttcagagccaggacgcagctcaggagtctgccctgaggctccctctcttcttatttccctgcagcctggcccgggggaggcttggcttcaactggcagctcaatttagccaaattcaggacaggccaccagggccctttctacacacacgctagtcccaccccaggttgagtgaggcagggccagtcaccagaggagcccggagcagagcaggaagcagagtctgagctgctcctccctcacccaaggggcttcctcctctcatctgggggaaaagtgtgagcttgtttcaaagcctcagctgtcccttgtagctcatggaataggtacaagaaaaaaaagacgtggcagaaggggatgtgtcggtgacagcgagaagcaacttgatcttgaggactctccttcttgtccctctctgaagcctcttctaccacatagggctcagggctgataaagccccctccctacctttttcaggccagacacaaggtcagccataagaaaacagaaaaacaaggagaagagagtctgtagagacaaattgggagggttcaggaggagaatttgggatttgcttgtgcccatgggacacaggctgggaataaaaatgttttcctgactcttctctgaaagccagatagactccacataaaaccctactgccaaggatgctgggatccacttaccagagactttgactgtcatggatttggagatttccttgccagtggctgagttatgaacagagcaagcatagagcccgctatgatttctagtaatttgggggataaagagcttttgtcctgattgctgaaacttcccattaattgtccaaaaatactctgccggtgggttagattccgtgaagcaggacaagtcgaggttttctcctgaacggtaataggtgaatgaagggtaaattctggggaggtctggaccatctggaggaaagagaataaagccacacgtgatgtcattcgagggaaggggatgttcctggtctcttaaagggacacagtgaccctctgagccaagacacaccctcaagtcccagccaaagtccctctatgttcactgagctgaagcctgaggtattcacctgtttctcccatcacaagctgtgggccccaagtctcccatgacaagagcatccactccccttatattcttggttaaggctgtgcctacccaggttttcccagggcagggagtcatggccacctcggatgtctagaagtaaaggtgtctatacttggaccggagagagactgagaggcctggcatctggtcgtttggacttaagctggtgtcctggcccacagaggaacaaaagatactcacagaggacatttaggatgactgggttactgcggaggccaccatatcggtcccgtatttcacattgatagggtcctgtttcatttctcgtgacactgggtagaatgagtatcctgttttcaatgggtcgctttaccccgggactgacggggaggctctgaccgtttagccaccaaatgtaggtgtagttctcactcttaggttcacaggtgaaggctaagacatccttattctccctggggtttaagttgttgatggtgatgtaggggatgggcagcttcgctgtgtggataacagagagaagattgtcctgtgtggcacctttgattcctccacaggcatacttcaatcagagttggcatctcccacctctcagcccacccgagtccttgaaagccaatagctggtgcgtgtgtcacaagacagatgcatgatgatctaagggctcaaagactgtgaggccgcctgctctgtcttagggaagcacagactttctcaagtgtcaattgagcagcagtgttgggtcatggacagacacatcagtgggagtcacagcccctggtacccctcccagtccctccctaatcagttgactggctggctcaccttgggttccttacctggaatgtgcaactgctgggccccttccaaattccatcctactttgcccccctatatgtgatttctctgcagcttccatttctaaggatgttctagagatgagtaataatgggacttcccattgtcctgagaccctgaagatacttagcagcctggcctgggactggatgtttcagcagaaataacacagaggagaccagagtcaagcctggaggtcagttcagtcatcaggcagtggaggctcaaggtggggcagttttttgcaggtgtttcatgatgacttacttgaaccagtgacctctaaacatagagcagagtgcaaggaatgatctagaaagagtgaaggcgacaggcaagagctggtggctttggagcagaaccatgttctctgtcctgggttctttaagtttcctctccttctgcagagggcagaggaggaccatgtggatctttccagaaatacatgtggacatttgcaaatgcagaactgactggtggaaagtgtgggaatgaactgctggaaatctggtcctcatggaccatgtgtgtttgatggatatgagacaaacttggagagaagttttgcaaatattttctttcattggacattctactctctgatcccctgggttcgactactctagggacctcatgtaagtggattccagagtgaatatgagaagagactgctggttgccaggagctgggagtggggagaatcagaaattgttcatgggtgtgcagtttcagttatgcaaggtggggaggttctagagatctgctgtagagcttgatgcctatagttcacacagattgagtatttcttatgcataagtcttaggacaaaaagtgttttggatttctgacatttttttattctgaaatatttgtcatatacttactggtttagcatcccaaatctgaaagattcaaaatctaaaatgcttcagtgagcatttcttttcagcatcagattagtaggcaaaagtgggaggtgataagccaaagatattcttgccctttttttttctctcaccacttttctagcttgatgattagtttttggtcaattccatactggccatgctgcactcatatattttttaaagctttgggatgtgagaaaggctgattgctattttctttgtcatcagaactttccaccttttctggttgcatctttttctcagtgtttgtgttgtggcagtcattaataagatcctgtcaggtcagatttaggacagagttttctaattctgcaaaaaatgttactgggattctggtaggggttgcattgaatctgcaactcaattgggtagtattgtctttctaacaatattgattcttccaatccatgaaaatgaaatgtctttccatatattgatatcatctttaatttctttcagcaatgttttgtagttttcagggtataatcatttgacctttttggttaaacttattccaaaatattttattccttttgatgttaatgtgaattgaaatcctttccttaacttcctttcagattgttcattgttagtgtatagtctaaagaatgatctagaaagagtgaagggacaggcaaaagctggtggttttggagcagaaacatattccctatccagggttttttattttccctctccctttgcagagggcaggtggctgttccctgacagctagatagacttcactggaaaacatagtgccagtgctccagggacccacttaccagggactatgatcctcttgattatgagatttgttccaccagtggctgagttatggatgaaacagacatagaccctctatatgttttagtgatttgggggataaagaacacttgtgctgagtgctggaacttcccatcaatcagccaagaatgctctgccagtgggtgagagtctgtgaggcaggagagattggggaattcccctgtatggtaatagatgtatgaggaagaaatggtgggtgcatccaggccatgtggagcaaagagaataatgtcacaagcgatattgtcagagggaagggaaaatcctggtctgtggaagggccacagtgaccctgtgagccaagtcgcaacactgaagtcccagccaaatccctgctgtgttcactgatctggagcctgagacattcacctgtttctcccatcacaagctgtggacccagagtctcccatgacacagcagcctcttttctcccattgttgatcaagcctaggcctactctggtttgcttggggcagaaagtcatggccagctttgatgtctaggggtaaaggtctctgtacttggacctgagagggactgagaggcctggcctctggccatgtgtatttgggatggcagcctggctcacagaggaacagaagatactcacggaggagattcagggtgactgggtcactgcgactggcactcactgggttccgtatttcacattcatagggtcctgcaatatactttgtgacaccaaatagatagagggtcctgttggttttggacagctgcaacctgtgagtcacagggaggctctgaccattcatccaccataggtagcttgcgtccagagtctcaggatcacagattaagcgcacagcctccatggcctccctggggtttaagttgctgctggagatgtagggcttgggagtctccactgtgcagaaaacagagagaagattgccctgtgtggcacctttgattcctccaaaggcatttttcagtcagagttggcatttcccacctctcagcccaacccagtccttaaaagcccatggcaggtgtgtgtgttacaagacagatgcatggcaatctgagagctcagagattgtgaggctgcctgctttatgtgggagaagcacagactttcttaagtgtgaattgagcagcagcattgggtcatggaaagacacaggaccagcagtcacagcccctgatgcctctttgagtccctccgtctccaactgcctgactggcccaacttgtggtcctcacttggagcatgcagtgctggaatcctcttagtttcagtcttactttgccccctgaggtatgttttctctgcagcttcccttgccaaggacatcctagagatgggtgatggaacttcccattgtccttaaaccctttgggtattggaaagcctggtctgggactgggtacttcagcagaaataacacaggggagaccagagtcaagccgggaggtcagttaagacatcaggcagtggagccacaaggtggggcagtttgcagttttcccaggtgtctcatagtgactgacttgagccagtgacctctaacgatagagcagagtccaaggaatgacctacaaagagtgaaggggccaggcagtagctgatagctttcgaccaagaccatgttccctgttctgggtccatgatgctcccttccccctgtagagggcaggtgaggaccatgtggatctttctagaaatacatgtggatgtttgcaaatgcagaactgactggtggaaagggtgaacatgaacagatgatggaagtctggccctcaaggaccatatgcgtttggtggatattagaccaatatttgggaagaagtcttgcagatactttctctcattggacattctactgtctgatctgagtttgactactctatgtacctcctatcagtggattccagagtgaatcagaaagtagaatagtagtttgcaggagctgggatcaggggaatagggtgttgttccgtgggtgtgcagttccagttatgcaggatgaggaggttctagagatctcctgtacagcttcatgcctatagttcatacagataaagtgctccttattcagaaagcttaaaacaaagtgttttggatttctaattttttttattttggaatatttgcagtacatgtactggtttagcatcccaaatctgaaaaatttaaaatccacaatgcgccagtgagcacttctttttagcatcacatcagtggtcagaagtgttgacttttgagcatttcagattgtggatttctggatttgggatgctcaatttgttatactgtaattttcccataaaaagttgtcaggagtttagacctcatgttgtgttctgactctagtaacaaaaaaaaaaaaaaatttggaggaaacattaaaatgttttcataagtggaaacttttactgatggtccaaacatctaagatcaattgctggtagtagtatttctcttgagaccaaaataaggtttaggtgtgccgtgaattccagcaggatcacattatgctcaaagaaagatgccaaaggtgattggaaattagcagctccttaagtagagagagtcccgttaaaaggaccgaactggtcagtgcatcaattacataaagggaggaaggatgccaaattaaaagaagtgatgtgtgttatgttagtaaatatagaaagaactccctgcttctaatttctgtgcagaattaggaaaaatggggaggactgcaaaacaggtaggtgaaatgctttcttcattttctcttaagctcaggaaacaccactaaaatttaagtctgtgtgaatcaggaagattctaagtgagatgccaatggctcgtgtgtctccccacatgcagaactccaacttatgaaaatggcatcatcatgaggaaatagttgtatgagacacaggcagtaaaaccattagatatcacccacctggccacctccaactggtccccaaaaaccaccagtattcccattatgtgtatgttacagcctttgtagttgtcccacaactacaaaatttaaaaattgctattgtcaaaacaaaatattaaatatgaagttgaatatgttgttccactttttcttccccactttttttgaactttcctttttcagttttggaagtttctattgacacatcctcaagctagggattctttcctcagctgtgtgcagtctaccagtaagcatcaaaagcattcttcatttctctgacagcattttttttttctgagacagagtctcgctctgtcaccctgactggagtgcagtggcatgatctcagctcactgcaagctccgccttctgggttcacaccattctcctgcctaggcctcccaagtaggtgggactacaggcgcccaccaccacgcccggctaattttttgtatttttaatagagacagggtttcaccctgttagccaggattgtctccatctcctgaccttgtgcccgcctcggcctcccaaagtgctgggattataggcttgagccactgagcccagccatctctgagggattttaatgagttgttgacttttgagattgttcagctttttacttagtgttagaactgagtgacaaattccaagcttgttatatgcctgacaggaagccagaagtctctaggaagtgaccagagaatgtgagctccatagcaggttgaggatggagtcacaaatgaaatgggtgaaatgagtccatgtgctttggggactgcaggcctctccagcctctgacaccctggttagtcagggcagagattacacagtgacaggaaactagcatggctgactccatctggcatctagtctcaggctggctgtcctcactcattcctggacataggtcaggctaaccttgggaggaatttattttatggtttaactttgaagcaagaatgataatagttcctccataaaactaacacccttactttgcccagggactgcttttgtcaaactagtgaaagaccatgagattaagattataggagggaactgaattctgctaaaatgttgtcacagtttctataatccctgactgctccgatgtcatttggcaagagtttacaaaatttgtaactaattgctcctatagataacatcactattgtagaacgtgagattggtcttttgagatgtttctcattcttttgcattctggcaaccggctgacctcatccatacctatgactaatggctcagtcagtcatgtggcccctacctggaggcagattcaagcacaaacaaatcatttccctccggccgcatgattccatcaccaaacaatcagcagtactcattttttagtcctgtgcccctgaaacgatccttgaaaatctctaacccctgatccactggggaggctgatttgagtaataataaacatccgtcctcctgtttggcagacttggagtcattaaaatctttctccgactacagaccaccatttcaataattttttttgtgtgtgtgtgcaggaggccagaagaacttgtctggcaattatgagtggatggaggaactgcctatccctgtcccatgttcttgtccacaggtcagactgacaaagggaaagagccatggatgggaatacagtggaatatttctcttagtgacctggggacattggctggagatgaagccaggcaggagtggcaactccaggtgatttctgtgcctttcctatttcctgggaggtgggccaggccacagtgttagtaggaagggaaccgaacagccagcctagttagagggaatgtctggggaaggcctaggggtgggggaagaagctgtgcaggacagggcttgccagtcagaatgaagtgggaggaagatgagggacacagagaagcagagagaggcagagacaccatggcagtgagcagtgagggagacactgacttcagagaccccagggcccaggtgcccccagttccacagtccaggaccaaggagccctgagaaccctccggtggccaaagagcttcagagttacatgaggtggggtggctttaggggcaagaggtagtggggggatgaaacgtgggtgtcagcctctgaaggacaagggacaggtgtggctagaacctcctaggattctgcatgcaaattcagtctctaaagaggttttggatcattcatttcttcattcaagttcttcattcattatgtgagagctcctgagtgtgtgtctctcgctgggcctgtgctggtgtagggtgtgagtggggaaagaaaacaaggtcctctccttgatcctctcatgacagtgacatggacactttgggaaacacaggatttcacgttcagtgatgggggttaagatctgagggggaggcctggacatattttttgcactgactctgatggttgaggcaggtgatttagttctggaatacagactaatcagctgaccatttgctctcactcctctgaggtttggatgcctaagaagagaggatttgagccaataaatgactatggggtccttggaacccagtaagccctcacttctggtggaggagaggataggcctgtggctgcagacagacctcatgtgaccctgatctcccctttgtgtttgtgtgactctggttcagtgactgcaccttcctgtgcctcagttttctctcaatcaaataaactaaatggcaaatggactgtggcttttcatgctatctgtgaataaatgttaaatgattcacagtcacctgacctaatgcttggcacagtggaggtttcacacaagcagcatttattattaatttgcttccatgagaaagcaccttatgtcagatccctgtggacaagctgctaccaggtacatcttctcccttctgtttctgcttctggggacattagactttctatggactgtcctaagcctcccaaggcagttggctgatgtcctacaaagcttgtctttctgtcctctccactctgagtgtcagctgaaaaagctctgtccttgcccagatgagactctgagggctgagccctggctggtgaacagctccaggagacacagtcctcagacagctggtaaattcttggtcccagtaaggcctgcccaagaagccacaacccagcactggcacaggctcctcagcttaactggagcaaggatttagggacaggggtctggggttgaggcttctagggctgagcttctctgagagtatctcaggggtcccctcaagccaagccctactcagttctccagggtctttctcagggtcaaatttatgaagagggcatgatgtgcttggctgagactgatctcctcctgctgagtccccccatcagactgtccttcctctgcagcgagtgtctgcagggtctggatgcgggaaaggaattctgatctgttgaaatttgtctcctctgtgtgtgtcctgcactaaatgcccaaaccccagcatgggacataatgcagagagtgacacaggcagagtccaggcctgacaatcctgtgtgtgtgaagtagaaatgaccccttccccccaacacccagggatcatgtggaatcactcacagtataaggtgaaggtgaaatgtcgaatttcttctctagtctcatcacctcgctttatgatgtgtaaggtgtaggttcctgcatccttccgggtgacattctggatcagcagggatgcgttggaatatactgtttctcttccactgtatgcaggcccatatataattattttaccatcaactatatacgatataatgtaatggtagaggtccgtcatttcccctttgtaccagaagtagccaggaagattctggggcaaattgtggacaagtagaagaacatccttcccctcagaaactttgggtggctgggcttcaatcgtgacttcggcagtggtgggcgggttccagaagtttaaaagtgatgctaggagggggagacagcatcagttaatattgagacctatgtattgtggtgaaaagatggggccctgggtcctgagaaggtctcttccatcctcagccttgaagatacacacacgcacacatacaaacaaacacacacaaaaaacgggcatgtgtgtttgtgtatgtgtatgtgtgtgtgtcctactgtcctactaggtcaaggtcagcagcatgacccccattccttcaacacttctgaccttggcatttttctgtttggaatcctcttccccaggggtccacacggccccctccacactgccctcaggtcctgctcacatcagggcatccttagacttctttcctgacacctccttcagagaccctgggtcttccctttctgacctttccctgctctgctccctccagggttcttgtcaacacctgatctcacattctacatctcttcgcatgtctgtcttcctccccatgacagcgtgagctccgtgaggacagggacttttgtgatcctggttgcaccccagtgcctgggacaggctgcagactcctgtagatgtgagagttctcagggccctccatgccctgggtgtttttttttcccccaattgttgaggttttttgctgaggatagtgtttcatgtcctgcttatatttttatttgaagtgtcatctgatatagttattattatcatttttcaaaatgtggtggccccggatgattaatcaggaaaacagaacacttaagattttcctacctcttaccaattccggttcaatgtgactttcctcttttgacccctgtccctctctggtgtattttcccctatccaggctgcaacagagccttctttcctttttttcttttttttttgagacggagtctcgtactgtcgcccaggctggcgtgcagtggcggtatctcggctagctgcaacttctgcctcccgggttcacatgattctcccacctcagcctcccgagtagctaggattacaggagtacaccaccatacctggttaattttttatatttttaggagagactgggcttcactgcattggccggactgatcttgaactcctgatctcgtgatccacccacctcagcctccctaagagctggcttcttttattttacaaccccatcctctccaggagaccccatccagtcactccgcttcctccccctgtcctctcccaggaagttctctcctcacctgtgagcaggagccccttccaggtgatgcgctgtgtgcaggaaggggctgggaggggccccatggtctctgctgcctgtgtgttctcctctgtggagatgagcctgggatccagaagctgtctgagcacggctgtcagctgtgctgtccttcctccttctgtgctgagcctcttcccggggcaggagcacttctcaagctcatgggcggggtcagtcccaggacacctctctgtccccttctctctcagtcctgcctccttgtccctccttctgtttttccttttgtctgtgtttcaggtccctgggagttgtggaggcctctgcctttttcagcagtgattctttcaccaaacctcaacacacactttgtgcagacacacacacacacacacacacacacacacacacacagaagagacacacacagacccacacagtcaggcacataccctgcaggttgggcaagcacagtcctgggcctcagcctcctgctgtccccatggctctgggttggggtgcacattcatgccttttaccctctttcatccccatctggctctccccttcagtgcaggaggctggagatgcaccaggtccctgtcacagtgacaccccattgtgctgtgggtgagctgtgtgttgcctggtgagagggacccttcctttctctaatcgtgtcaagcttgactgcagcttccaaggatggactttcaggacctgggtgtcccagaggaaactgtccttcctggaggtgtgcagggtgaatctctcatgcctcttaggaggagaggcctgtgctggttgctcagtgggggctgtgagtcccatagtcaaagggacagttctctgtcagtctatggctccctggggtctggcggctgagctggagctcagggtttctcatgttctccctgaccatctttgatgtcctctcttctctgcccagctgattgtcctgtggtcaccacaccttccccgtggtggtgcaggaggaagtggggagttacccaggaaccccgcgggacatggctcattgagacgcaggagggggagcctgggacagagcaggggttcagagctggagagattcatcccgacttactccgtggccatgatgggctcagccctccatgtgctgacacacccaggggtctgtcctgagggttttgacctggccaagctgctgtctgtagaggaggaacaggcagtgaccagagaggctctctggagggacgttgctcacacctgagagggcgggtgggggtgagttgtgttctgggagcaaagagcaataacaccgcccttctccacgcaagtacacaggagaggtctgtcttcccaagggacagctgggggtaggtggccacatcccggatggtacctgtgaatgaccatcacacgctctctgagccccctggggtgcagggggcaggcaggtgacagggtgcctggctgattcccggggaggctgtgggccctcaggcagccgctgttctgtgtcggcgctaggcttggcctgggaagccccagagaacaggacagatggagcaggggcaggcatttagggagcagtgacagaaagagttgatgaggatggagagagttcacgaggggaaagcgcccagtgtggcgtcgcgtgcaccagcgctgccctgggagatgcctttagctgggcccagggaaggagcaggtgtgtggggcaggagctccctgcagagggagtggtgttaggttggcggccgccaggtcagggaggaactgacagagtccgtgtggggagcatggagggtgctgaggacttgggccgaagtgaccctggtgagggtggaccctgctgggctgtgggttccgctgagggaggttggcatcccctgggaaggctccaggctgggagggactctgtcgccctctggtggacagggagggaagtgtgaacggcagcaatcccaggccaggctgcatgttttattccacttcacacgaggtcacacatatgttatgttacagctccttcaccttccagccccgtgagtcccagtctctgtggctctacgttcactgttatccctctttcacaatcagatgtcccaaacgcagatttttgtcaccttctgtgagtttgtgtttgtgtgcagtaggcaacactgtgaataccctgggggcagtgatgcctggggctgagcactgcacatgggtttgagagcagaagagggagcagcagggtgggaagatcaacgtcaggggggcaaggacaagtcattttcattttctcactcccagggaccagaacccaggattctgactccagggcacagtaccacaccctgctggtgtccctggatgtcatgatgctcatagtgtcatgttgccttggcattcattttttaaggtgtaagtttatttgcctcaaatcagaggcagggcttggtcaccatggtagttttcaatactgtgtctggttcaagtggctccagttggtgtccagagataaaatcttagaggcatctctcctgcttggtgtgctgggctcccctctctcaagctgctttctttaaactgataattctgacattcgccctcacatttaaagtgactacctctcagtcacagcgtgagctcctggtcccagtgtttgctgcttgctttgaacacatccattaaagctccctgctggaaacctgtcagataacaccctggacttaataaagccattcgcttacaggtctcttctctcctccctgcatggggtcactgaccactgtgtctgtggtctccaggtgtgccgagtgctccctagtgtctggaagtagtaaaaatacttacattttcacgttgtggttgtattgctgttgcctcacatgccatccagggcctgacattgaggctgccctatgggacctgtgctggttgagcccttgctggagctcttgttttggggcctttgattctcctggggacaggagcttccagctaatttgattgaaatactgatgtgtttcattgacacactgggtcagatgatgtattcatgggcttcagctgccataacaaacaccttagcttgggtgaacgatataatagaaatctatttttcacagttctgtgaataatgtgctatttcaaccactttaaaatgcacaatcaagtgaaattaaccacatacacagtgttaaattaccatcaccactattttccctagaaaatttttatcattttaaactgaaactttgtatcttttaaacaatacctccttgtatgttccaccctagactttgatcatctctactctgtctctatgaatttgcctattcttgatgtctaatataaatggaattatacacttacgttaatttgtttctgacatatttcacttagcataatatttccaaagtccatgcatgttccagtgggtatcagagcttcattcctctttatggcagattaacattctgttgtatgtgtcaccatatttatttattgatgtgttgaggagcacttggattgttttcatattttatattttgtgaataatgctgcaatcaacattcccatgcaagtacctgtttgagtccctggatttaattctttgggtatatacctaggaatggaagttgtttcaaatgagaattctatgattagctttttgaggaaaagcaaaactgtttctcctttttatattctcaccagcaatgtatgaagattccaaattctacataatactggtacttgttatttaacattttaaaagaatggtagccagttttgtaggtgagttgtcgtgtctcattgatgctttgactttgtattttcctaacgactaatgatgttgcgtatcttctcatgtccttcttgactatttgtatatcttccttgaagaaatgtctatttgagtcttttgcccatttataaattggatggtttgtccttttgttattgagttgtagctagttctttatattatctggacatgaaaactgcctatatgtggtttgcaaatattttctctcattctgtatctattaattattttcttgataatttcctttgatgtacaaaaggctcacatcttgataaagcccaatgtatatttttttcttatttctcatgcttttgtatcatatctaagaatccattgcacatttgaggtcatcaatatttacatctatgtctattttaagatgtttttatggttatagatcttatatttaactcactgatcaattttttagagaattgtttgatatggtgggaggtagagttatctaaattcactgttttgcatgtggttatctagttgtttctgcactatcattagaaaggagaattgttcctccattaaattgtcttgacaccctcttcaaagagtaattgaccataagtgtgagggtttatttctagactctcaattctatcccatttgtctttatgtccattcttttgccagcagcttctgttttaataattgtactcctttgtgagatttcaaataagaaagttcaagtcctacaatttcttttggcaagattgttttggctattctggggtccttttttgaaaggtggggaagccaatgtttcacaattgggaaagccttttctgtcttcttcagggggaaatttgggagaatcttttaagaaacttaatctaagtaggtaaactgtcaccactttatttgctgaagtgctatgttaaagtgtgcattgcctcttgtggaagaattgtgagaccctggaagcacttgcccatgtggtgagagacagtgaattccacgatgaggggcagagaggacattgttttgtgatacaatgttgttgggggagttgtatacatctcaacttctttatgtctctgtacagtgggtgtagggaccagccccacagagtcggtgggcttttctccccatgtgcagagatgagagattgtagaaacaaagacacaagacaaagagataaaagaaaagacaactgggttggggggacctctaccaccaagatgtggagaccagttgtggccccgaatgccaggctgtgctgatatttattggatactagacaaaggggcaggataaggagtgtgagccatctccaattgataggtaaggccacatgtgtcacatgtccactgtacagagggccctttcctgcctggaagctgaggcagagagagagaggagaaagagagagagagcttacaccattatttctgcttattacagacttttagtacattcgctaatttcctactgctaactaaacggcagagccacgtgtacaggatggaacatgaaggcggactaggagtgtgaccactgaagcacagcatcacagggagacagttaggcatctgaataactgcgggtcgacctgactaatgtcaagccctccacaagaggtggaggagcagagtcttctctaaactcccccggggaaagggagactccctttcccagtctgctaagtagtgggtgtttttccttgacactgaggctaccactacatcatggttcgcctggaaaccggcatcttcccagaccctggcgttaccactagaccaaggagacctctagtggccctatctgggcataacagaaggctcgcactcttgtcttctggtcacttctcactatgtctcctcagctcctatctctgtatggcctggcttttcctaggttatgattatagaccaaagattattataatattggaataaagagtaattgctaccaattaatgattaatgatattcatatataatcatatctaagatctatatctggtataactattcttcttttatattttattgtactggaaaggctcgtgcactcagtctcttgcctcggcaactgggtgtcctgccgcccacaagtgggcatctccattgcacacagtaggttttgaaatccttgtttatcctctggggtctgggtcttggcttacctgttagctgcagctgaaagaggtgtctgctaagtcaatgacacctgtggggagaagaagggttcagcagagtgaaagtagctggggctcagagaagccaggaaagtctgactcttagaaactgtgggtcagcagatgggtgtcctcagggataaatgggccatgccggtagccactgcagtggattggaagaaggtaagggatgctgggtgtcccatgttctctgtcagctctgcagctgaagatttgggccctgggatggtacggccctgcagcaggggatgggtatacaggaatggctgcatatcgggaccaagtccatgtcatcttcttaggcattgttactgcagatggaggattctgttcagagacctggcctggacacatgggagggctcaccccattcttttaaaattattttaagagaacagtattagcaaatgtggtacatgttttattctgctagaatcagtattactgtcacgttttacaatgtatctcttaggaaatggtgagagccatccacacaatgtgcatttaaaggagactctactataatttcagctttcctactctttatagaaaccatcttctctgcaaacacacaggcaatatctctgtgttcatttctattgggagccctgtatgcaaggtggagagagccacatttccccctgagatgttacataaaagtttgaggttgagatgacatatctgacactctgttattaccctcagaagctactacatgtgaaattctaatgactgcattatcctgccaagtgaaaaaggtaggcatcagcaaggacagttaagaggggtgagagcctcatcatgatggggagtcttgttctgacatcttgggaaaaactgtccacagtgtgaagtcatcaacttgtcctggtttacagtttgagtggctgttgttatggcgtcgaacattttggtgagttctgagtggctcacacgtcaggtacaagggttttcccatgaaatttacattgagttgtccaactccagcttatagggcttctggaacagagtgggtcttgctcttagtgattccatgggagaaaatggaattggaggaactagtagaattcagggtaatgtccagtctacaggtggataataaaaacacagaaacaatgaacagagctgcaatctcataaccggtgtactacagtttttattttccacataatttttctctctatgggcatctctagttttaccaatgataatttcagtagaataagtttgtttgcaaaataggttgagttacttcaaacatggtctgattctttacataagtgcagcaagagtagcaatggaccatgtaggctctcttttaaaattttctttgctctaagtttttataaggaatctcagattaaacttttacaaacctcttgagaacaggaagccaaaccaaggttgacttcagactttgcctgcagttcatattggttcattctatctatattcttgaatataacatcccagtcaaagccttggtaataaaaccaatgatttgaaatgtgtcgtgttaaaaagagagcagactgttactgtacttgtgcaaatatctgtattaccataaacatatcaattctcatgaatagttgcccaattctggggcagtcaggtagagagcaaaagtaaatgtttcaataattgttcccagaagtatagtttattgaactgctataagctatagatagattaaaagaaaaaaattccataaatctagaaaacaaaccatttaaagaatcagcaaattttcaaataaaaatcataaaaacattatcctcattattatcaattatttcaatgaaatcaatatttttcctgcttggtacactgagaattttatgaagatatcagcctgtttcttaaagttttggaagttcttagacagtccggtggtataatgtgaaatttatcagaaacttgtattaaagagttcttgtcagcatcgtttccataaatctccttgaaaaggaagcatttttggactgtagctgattggaaatgctttgaggaagactaaaaacaacgtctgtgaatgacaaagattttaaatgactatggctaaaactctgatgagaattcattatgataacacagctcacataaaaggttcattacttctgtggtatatgacattatggctgataacatatttaatttctaggaatctcatacaatttctggaacaatcatatcagtaacatatccataaatataacatagcaaaggtttagcatcctttaccacttatgatttgaaaatgcttttcatataattttacatatcaaataaagtggcttttccatgtagcttgtgtttctcaacaggattactgagttcttggtggaggccattaatgaatagggccaagaaagtataggcatatgtatgttgaaaaatatccctagataattctaatactcccagctaataagcattaattgaggtctaagttttacctattagaacagctgttctctattctggttacacattagtagcacctgggaagacttaaaaattaccaatgcctgtgtctcactttagaccattaaattggatcctatgggtggggcttgggcatccatttaaaaaaacgttttccagtggttccaatgtgtagctgtatttcccatcagatttctctgatttcttgtggcattcacgtttttctattttggtattataattattttttgggtcttatcatctatcttaggctttatgttccttggggtagaaaccttaccttcttcatttctgtatctttcatgaacatatgggttggtcatcaggaaaatgttctcaatcacgtgtaggttgtgttctgagtctcaggtttacatattaatgctagagtcattgttctccaggaggtcagaggttgcttgtgatgaagggtatgggtaatcccatactgcagatggtagatgggagatcaccctgtttttagccatagcattggaactaagcattctatgtgtatatcaggtggaggggaagggatgtgtagaaagacagatttaattagaatggaggaattatactagggaatagagggaatggaagcaataaaaattagtaaagagaagaaatgtgaacttatcaaataggcaagagtagatccctgaagatttttgaataggtgagttaactagaatttaggaaggtaataaggcagtcatacacaaggaagatttcaaagactggagataagtcaagcagtatctctagcagttgttaaggttgtgggaatggagagaatgacaaaagtgaggatgttaaaaaaaggatcaagagggttttataaggtattgaatctgggaaacaaatgagcagaggctgaggatcatcatttgtaggagacagtggggtacagggagcatgaagaacaggggagaagagaccagcaggaataagtgctgagaagcaggagtttagtgggaggaggaggagatccagtcccagatacaggcaaagaagtcctttctctctcccaagcatggcagtcagccctgcaggaaacaggacaaaaggaaaggccatcatacctgcagtcttcctgaaataaactacaccagggctgctagatcagagccacactggccagtacttcaatcaagatgctgaccgtggctctacctgaaaggccaggagaacttccttgtactgaagtatctgtcatggaaagaaaagaagagaaggaataaaggtgatgttattttacagtgtggtaccttagtaaccatcactaagtatgaagtagtttctacttgttcctttggggattacattaattttgtgggagggttgctggtagatgattagccaactatattcttacagttttttttctctatcaatgtgtttctaggttagtgatcagtcttctgtcaatttcatcctgatcatgctgcactcagatatttttgaagcctttatgatgtgagaaaggctgactgctattttctgtgtcattagaactttctaccctttcatggttgcatctttttctcagtgtgtcagttgtggtaggtatgaataagactctgtcaggtctccatggcagcttgtgtttctcaagaggattactgagttcttggtggagcccattaatgaatagggccgagaaagtataggcttatgtatgttgaaaaaattccctaggtaattccagcactcccagctaataattgatttattaataatcgattgacttgattgacagaaggcccagatcagtgcattccaaattgacaacctactttgcatagagtcctcactttcctgaagctcccagcagggatatgaaagcaagcccagttctatgagcctctgtttcattctcctgggtgactggtggggagactccccatcagtcttgccatgatctctttgaactgtagctaaatcttctttctctttctccttcacaggaatcagatttgatagtggtcccaaagcttcccagacttttttcatgcctgccccactttccctcacaggcatttttcctaataaattatcctgcatgtctaatctcatcttggatgcatctcagtgggcataaactaacataccaggcttgatttttttgcacttagcttttttctgtctctcccacatgtagccagtaaccatgtcctagtgtttatgtgttacctcttttttcatgtgtataggaaaaatatatatatttccatatacctatttatacatattatataataaaatatgtaatataaaatgtatagtaatgaaaaacatatacatattttccatatacgtatatggaaaatgaggtaacataaaacatcaggacacttacatataataaaattgacatatgttatatatgtatgtagtgtctgctagtcttaccctctctataaatacacactttttgtcactgccccttccttcccatgcagagctcccatggccaaatctccctatttccccaagtgtgtgtcactcgctgtcctctgttctgtgtcccatgcgctgtgcccacagcctcctagtgttttatgtgttctctttttctatatatatatggaaaaagcatatacatacttctctctttatatttatatacaatatataataatctaaaaatatagagtatataacaatttaaaatatatacatatttccatatctatgaaaaaaggtaacacataaacactaggccatttatacataaaattcacatatgtaatataaatgccaattttatcatatacaaataagtatatccatatagacttatcatatataaggtgaatttggaatgccctgacctgggccctctgtcagtcaagtccttgccatggaggccattcatggctgccacaactgagacaccaagagaaagatgcaactatgaaaaggtgaaaagttctaaagtcatagaaaatagcaatcagcctttctcatatcccaaaaccttcaaaaatatctgagtgcagcatgtccaagatggaattaaaaacttcgatcttgaaaaggaaaaaggaagctggaggactcacactttcagatttcagcatctactgcaaagctacagtaatcaatacagtgtggtactggcataaaaaaggacatagaaaccaatgccatagaatagagaacccagaaaaaaagcttgcatatatggccaaatgatttttgtcaagagtgccaagaccattccatggggaaaggacagtctttttaacaagtgatactgggaaagctggctatccatggacaagtatgagttgaacatttacctcacaccatatccaaaaaaatgaacccacaatggatcaaagacctaaatggaagagtgaagactaccagactcttagaagaaaacataaggaaaaagcttcatgatattgaatttcagaatgatttattagttacaactacaaaagcataggcaacaaaaaagggataaattggacttcatgaaaattaaaaacttttatatatcaaaggccattatcaagaatgtataaaggcaaactatgacatagggaaagtttctgcaaatcatatatctgataagggattaatttccagaatacatgaagaacactacaaatcaaaaacagcaaaaacagaaaagcccaattaaaaaatggacaaaggactaaaagagagatgttattaaagaagatatacaaatggccaatgagggcatgcaaggattctcaatattactaatatttagagatctgcaaagcaaaaccatggtgatacacgacctcacacacattaggatggctttgataaaaacaacatgaacaacaacatcacaaaacaagtgttttcaagtacgtggaaaaattgaagctctttgtgtattgctgatgggaatgggaaatgttatagccactgtggaaaaaaatggcatgacatggccggctcatgcctgtaatcccagcactttgggaggctgagatgggtggatctcttgaggtcaggggtttgagaccagcccggcaagcatggtgaaaccccatctctactaaaaatacaaaaattagctgggtatggtggcatgtgcctgtaatcccagctactcaggaggctgaggcatgagaattgcttgaacctgggaggtggaggttgcagtgagccaagattgagccattgcactccagtgtgggtgacagagcaagaccctgtctcaacatcaacaacaacagaaaagaaaatggtatgtcagtttctttaaaaaaaattaaagcattaccacttgaaccagcaattctacttccggacatacagccaaaagtattgaaaaatatttgaacagatattcgtacactgatgttcacagcagcatcactcacaatagccaatgggtggaaacaaccgaaaagtctattgaaagataagtgggtgaacaaaaaggtatatccatgctttggaatgttcttcaatcttagcaagggataaaattctgacacatggtgcaaaatggatgaaccgtgaagacattatgcaaagtgaaataagccagacacaaaagcataattattatatacttccatttatgtaagatagttagaatagtcaattacatagagacagaaattagaatggtgattaccaggggttaaggggagaaggaatgagagttatcatttatcgggttcagaggtttagtatagtaggataaaaaaagcactggaaatagatagtgttgatagtaacacaacagtaaattgcacacttagaaacagttaatggtaagtcttacgtatatagtgtctggtactcttaccctctctataaatacacactttttgtcactgttccttccctgccatagggagcttctgtgagttaatctccctatttctccaagtgtgcatcactcactgtcctctgtgctgtgttccaggagctgtgtccacaaactcacacaggcagtgacttcagagccaggacacagtcctattcccattttttaaagccttacccatgggaggcttagcttctactggcagctcgatttagccagattcagaaccggccacccaggcaccttatccacatgcctgccccaccccccggctggagtcagggcagggtcggtcactgagcgagcccacagcaatgcagggagcagagtctgagctgcttctgcttcacccaaggggcttcctcctgtcatttggggaaaagtgtgggcttgttttgaagcctctgatgttcatcgcagctcatggagtacacacacacagacacacacacaaaggagacagaagggatgttttggtgacagaaacagcttgaccatgaggaccctcctctttctccgtctgtgaaggcccttatactgcatagtgcttggggctgataaagccatttccctacatttctcaggctggacccaaggtcatccaccagaaatctggaaaacaaagggaagagaatctgtagatatgaattgggagtgttcaggagaaaaatttgggatttacttttgtgcatgggacacaggctgagaataaaaatgttttcctggctctttcttggaaagccagataggcttcacctgaaagcatattgccaatgctccagcgatccacttaccagggactgtgattttcttggttgcgaagtttttgccattagtgactgggttatggacataacacagatagtccccactattctctgtagtgacttgggggataaagagctcttgtcctgtttgctggttattcccattcagcagccaagaatactctgctgatgggttagagcccatgaggcaggagaggttgaggtttgaccctgcatagtaataggtgtctgaagaataagttgtgggttcatctgggccatctggagcaaagagaataaagccacaggtaatgttatcagagggaatgggaagctcctggtctgtgaaagggacacaatgttcctttttgccaagtcacaaccctgaagtcccagccaaatttcttctgtgttcactgaactggaggagtctaagacattcacgtgttctcccatcgcaagctatggaaccagagtcccctaagaccggagaagcccctcccttcctgggcctacccaggtttgcctgggacagaaagtcatggccagcttgggggtccaggggtaagtgtcttcatacttggacctgagagggactgagaggcctggcctcgtgttatgtggatttgggctggcagccttgtccatgaaggaaaagaggatactcacagagaacatccaggtgactgggtcactgtggctggtactcactacattcttcctttgacattcatagagtcctgtgtcactccttgtgacactgagtagagcaaggaccctgttatcattggacatctttagcctgggactgagtgtgagtctatgactatttacccaccacatgtagattgtgccatgagtctcaggttcacaggttaagaccacagcctcctcatcctccgcggggttgctggtgacatagggcttgggcagattcactgtgcagataacagagaagattcccctgtgtggcaccattgatttctccacgagcattttccaatcagagttgacatctcccacctctcagccaatccaagtccttaaaagcccacagcagttctgtgtgtcaaaagacagatggatgcatgatgatctgagggctcagagaccatggggccacctgctctgtgtgggagatgcacagacttctgaactgtgaatcaagcagcaatactggtgaactgtgaattgagcagggtcatataattagagtttgattaactttgtttaaattgggcagagtctaagtgaggcagcagtggctcatgcatctccccacccgaaggaccccaccttatgacactgttgttattatgagtacacaggtgtgcatgaaacaggcagtaaatcaaacagcacccacctggccagctccacctggtcctaggaaccaccagtattcccattatgtgtatgttacagcctttgtaggctacaaaatataaaatacaacttcagaatataaaatatgctattgtcaataccaaatattgaatatgaagctgaatatgttgttccactttttctcactcttgttaaactttgctgtttcagttttggaagttcctattgacacacacttaagctagagattctttcctcagctgtgggcagcctaccagtaagcccatgcagggcattctttatttcgcttaaagtgtttttaatctctagcatttcttttgcttctttcttagaatagccatctctctgtttaaatcacccatctattcctgaaaggtgtctcctttttccatcataatccttaaccagagttgttttaaattttcagtctgataatttcaacatccctaccacatctgtgtctggttctgatccttgctctgtttttcaaactgcattatttttttttttttttttgccatagtctgtcttgtatttttttgaaaaccacacatgatgtactgggtaaaagggacttgagtgagcaggcattcagtgacatggtggtgagtgaggggagggaagggttctgtggttctggatgagatctgtgtcctgggctgtgaatgtcacaagtgcctctcaggtttttctttccattaggtgggatatgatgacttgaggaggctggagttggatatttcccctccccctggccagttaagctcccatcaaaccccagctaattaggctgcagtaaaatagttcctcttaaatgtaggtcttaccaagaagaatataattcactgacaactttccaagtgtttttttcccttctctcctacaagaaggatgcagggattctttttggatattgactgtgagaacctggtagagctccaggagctaagagtcataaaactgtccccctactcccaaggctaattcatccactggtgtgtttatctctgcgctgtgtccacactgagcctccagaatttcctcaattagagttgaggttttctgaccccagcactggttcccgctgaggtttctgtgcctgtgtttctgctcaggtacggtgcgctgctctgtatttgcctgtgggtctcttcaatatgtgggccagttagcactgagaccttgcttctctgacaaatctaaatgagttgttgttttttcagtttgttcagctttttacttgttgttagaactgagtgaaaatttttaagctacttacatgcctggcggaaattcgaagtctctagggcatgactggaggatatgagccccacagcaggttgaggatggagtcatgagtgaaatgggtgaaatgagcccatgggctttggaaactgcaggtctgtccttcagcgtctgaccacctggtgagtctatgtagaaagtgaaaccacctttgcaaagcatatgatggtgagaggaagctagcttggctgaccccatctcacctctagcctcaggctgggtgtcctctctgattcttgggcataggccagggtaagcatggaaggaatttatagtttaactttgacgcaaggatgataatagtccctccctaaaattagctccctccttgtcggggactaccgtggtaaatctaagaaaagaccatgaattatgcaggagcccaaattctgctaaaatgcaggcatagtttctataatcccttactgctcaggagtcatgtgtccagaggtcacaagatttgtgactttcctagttgctcctatagatagcaacactattgtagaatctgagatttgtctttggagatgtttctcagatttttgcattccggcaaccagctgacctcatctagactcatgaccaatggctcaaccagtcatgtggccccccactcagaggcagattcaacaaatacagaccatttcccctaccggcatcatttcatctttagccagtcaacagtacttattccttagaactttgcccctcaaagtttttgaaaaactctaacctctgagccactggggaagctgatttgagtcataataaacttctatcctcctgtttggcagccttgggctaagcaaaaccattttttactacacatcaccttcacaataaattggctttgcctgcgcagagggcaagaacctgtcaggtgattataagaatggatggaggagtcactgatctctttctggtggcctgtttcatgagtcagcctctcagagggaaagagccctggactgcgacacagtggaagctcattctcttggtgacccagggacattgccttattatggatcctggcaggggtggctgctttggctgattttggtgcattttacatttcccagaaggcaggacaggcctaagtgtgagcagaaaggaaacggggcagtcagctttgttagagagggtgtctggggaagtcctcagggtggaggaagctgtgcaggacagggctcatcaggtagaatgaaagagggatgcacttttttcactgaacacctttcagacatctcaccaactctggcctcactgggctgtgcctttcctcctgagccctgagccctgattcctggcagggagggagaaagagaggaagggtgaagctgggatgtgtgctgtccaggtttcttccatctctagaatcttgacagcgagggaccctaatgtgttaccacagaggagaccatgggaaaaagctgtttctcaggggtgcctggcttatgaagtgagggaaattcagaccgagttggactcctgaactacagggaacctgttccatgtcagcaaccagctcctctagctcagtgtttctctctgtggctaattcttttgtatggtttctgagcctatgctagagtcctcctcacgatgcatgatggtcagacctgtgtggggagacctaatgatggggtgggggtggtcttgagtgtcacacagagtgtccagggaacaggctttgtgactttctctaccccagccccacaacaagatctggatagtgggctgggtcagataaagtcagaatccatggggaagggtatgtgtcctggcagtgccgaggttcgtgcctccaggttagctctgagtctctgcaaatacatttatgttgtgcatgtgctgtttgctggacggtacttcttgaacctgtctgcagataatgtcatgagaggtctgcatggaagtgtatgagggctatgtgattagggtgggtgtgttttacacagcgggtttttttttcaccaaacacttttcaaaaaattgtggttgagtgtgtatatagaaacacatacatacttgtatttgttagatgtgaatatatattcatataaatttgacatgtagatacatatgtctataaatatacacacatatatatgtgtgtatgtatatgtgtatatgtatatatatgtatgtgtgtgtgtgtatatatatatatgtgtgtatatatataatgtgccattttaaccacttaacttaaggagagagatagagggagagagaagagagtttctactaataccaaatctgggttaaataagggtggtcttatttcctggggttgggcttttgctacatgtgtcctgttggaagtgagctagagaggttacatgcttaaccaatttagagattttctatatgaaaatcatctgtgagcacattgataagttttatcctcttctacgtgaaaagcttgatgaaggattttaaggatttctcgttggctgaaggctggcaaacggagtttgccatcctctgactacagccattctgaggactggaaaggataccctgagaagtggcctattttatttctgcaggaaggtactgaggtttaatttatcttatggagtcttcctagattagaaggctttgaggtgtgttgatgccttgccagtgacttagctgcctgatcagtgaacctatttcttttggctacttcatctgttccctttttgatgttctctataatgtatcactgctatttctcatgaaagaaaactgacgataataacctgttaattttttggtgatattttataggaagtccattagtggtaagaaaatgccttttattttaaatggcagcatgagcatgaagaactcaaaaagcatacttggaatcagtgtaaatgttagctacctttcccttgcttaatttaagtgctcttgtattaactgtttgtttagctgattgagcacctgcacctgaagagagatattatttagagtgactactgcttatcctaccttacgtatttcttgctttaccagctgattgttagctaagagctccctctagaggaaagtaattttgccacattaagtgggggtgtaaaccgttttttcctagggttaatttggaggcttttctgattagtagagctattgtgacagtggtttggaagcagatgtaaaaaataggtcctcctaactgcaaataagaggctgagaaaaatattggattagaatttttcctgagacaccccttatggttgtgctatgggaagaggggaggcctggataagaaaggagaaaagagagagactagatctagtgtttagaaggaggtctactttcctccctataatttccagaatgacctgtgtctcctgtgctgtaatggcagtttgagctgctggagccaggggtttgagccccaggacccatcagtcctgctggaccactgtgagactggttctgaacccagtgacctccatctctgggagcagttgcatctccagtggtctccaccacaggctggacagggtcaaggtggcttcctcttgctctttggacacttcttcctcaaatgccctggcttgccacaccgagagcaactagtggatacacctctgggatcctggactttgcaactctgcaaagcagctactagaggctttgtccttctcttgagctttctctctttcttctgggccttctcctagtccctattataaaagactgaagtggctaccctcagaaggttttccaaggtgctatctgctactatagcttgccttttataggttccttctaatattgggagctttatgtataataaacttatcttttggaatgggctgtcacttgactgaatcaggagataaaaaggtgtgtgctaatagtgcccctctcaacctatccataaaggctgcaggattctcatctggctttgagtctatcctagacagtttagaggaattaagaggtctggccttagtttttctttttcattcatctacagggctattggggtttcaatcagggttgtcaagaggtactgcttcacttactatttggaatggtgtttctgctatttcttcactttctgtatctccttccttcccttttggtgtattataggagatatgttgctcatctccaaaattctctgctgcttgcagagctgcctgtttttcagctgcagttagggtttggattaggagcagtataacatccttccatgtgaggtgaaacacctgacttaaattctggaaagcttctatatacctgtcaggattgtctgaaaattggcctaagtcttactttatttgcctaaggtcctgtaatgagaagggaacttggagggaccccaaattatggagattctcagatggttcccttggaagttgcttttctaattctaggatattattctttataagcctgcctgatatggctgttaaaaaatctgggttgctgttacaatgcttgtaaaggtttagtaaaaatgccctgtcattttgcaaaatagaatgagttgcttttctcttgaaagtcctgaggttaaaagagttctagtgcctcagagtgcgctccagaggggtgcaagctgaagatgctctgttagccattgagaaaaagaagtgagaataaaagtgtccttatagtcctccttatttcattgagacccagagtggagtggaagacagtgggagcgtccccccaactgttttctctccttggttcctgagtcccggcactatgttaaatgtgctgcccatggttgtaggtgtggccctgtaagccatggaactagataaatgaagtgatgggattagccacactttacccatgcaacattagcttatctgcctgtgatctgcctggcttcctgaaaaatggatctctcgagaaactgtaacagttgcctttgagcaagctttctttaacagagggaatgtgccagttgccagatacgtgctaaagcatttaccctcagaaaagtggtcctggttaactctgttcttaaagtatccttactaattaaatactgttctaattggagatagaataggtactttaaatgaatgtagggacctaatggcagtttttcctgctgatgcagcagtatcagaactaaaatttggctatggaagacattttactcctaattgttgaaagcagagctttcccattcacagaaagggcttttctatcagtgcaaaaagagagaattggaaaagtgcagtgttatggcaaaggaccaacaatgtgccttatgaggaggatttctatttctactagatgacattgttggcttagaaataccacgtgcttaccaaaggaaggagagagagagagagagagagactgagacacctattgggttagttattatagcatttaccgatctttcctaacagaactgtttccctgaactgtaaaaatttccacatattgcatacacagaaagaataggagacatagagaccatggatagaaaggaagaacaaatttgcaacaggatagcaaattaggagacccattaccaacatctggatgggctgccggaggctgtgttcagtccagaagcctttgaataacatcagggtgtgtcctggccagaaattctcagctgttccaggacatcccccagcctcatgtgatggtgaggttctccatgaaaggaaactagttggaagagaaccttgaaattaaaggacagatttgaggtttgctccatactcaccattctgatgtttctatcttctcttctgatcacaatcccagatgagaactcccaaataaaatgactctgtttgggaatctatccatggttctttgtcacacactgagaaagaattcaggacatggaaacacatgaggagtgtgtttaggattgaaaaatttaacagacaaaaaagaagagagagagaaaaagctttctcatactgagaaagcagtcacccaagagagggtctccaatttggggtggaatgcaattgattttgtacagagacttaaggaggcagtgattgatttacatagggtccaggggattgttttgaccaggtgttccatttacatagcctgaaaaaagactggccctcccatcctattcttttattatgcaaatgtggcttctacctggtggtcaccatgaaattaggagatatacctaatgttaaatgatgagttaatggttgcagcacaccaacatggcacatgtatacatatgtaactaacttgcacgttgtgcacatgtaccctaaaacttaaagtataataaaaaaataaaaccccatggtaaatttctatttttttgtgttaccttggcatctatttttaatcttccttgaacacaccaaattttctcttgaaaaagcttaagttctctctctctctctttgctttgagatgtaaatgtgctatgtattttctctaaaactaggtaaagccttcctcagataaatgttaacctttaccatttacaagacagcaatttgaatccaactatcctttaaaatggtgggttttactgatctcatgcctaaactcctaaaatcaaaattctagaatctttttgtctctctctatctttatgtgaacatatatatgtttcatcacatatatgtatatgtcacacgtttatatactgtttacacatagtatcaaattaatgtaaaaataaatgagtactcacaaattaagtgaataagcccaaatgcttttctatatatgtgattttagtaacctttggtgaatatagatagctttaaaattgttggtaaaataaagtagaaatgtcttcataatttaatttatacacttttgcctatgtctgttggcaggcaggtttatattgtctttactagatgttttaaggtcatcaaagagttgcttgtgtatatatacattttcttaatttgtctgtgagcttatgtctttatatttgaagctttaaattctgagttctagatgagtgaccatagtaagaactggggacaaaacccatcccatcctccagctgtgccttttggccatgctgggagaggtgggattatccaggcattttcttcatagctctgttctttgtcttgggctttgcatctggtacatagttagaatggtttactccctagttttttttctactgaaaataaggctgtataagtctgtttttacattgctacagacaaatacatgaacctgaataatttataaagaaaagagtttgaatggtctcatgattcagcaggttgtagagtaagcatgattctggcatctgctcagattttgaggaggcctcagaaaacttacaatcatggagaaagccagtggtggaggaagacatcttatataatgggagctggaggaagagagcaagggttgcacactggtaaagaaccagataaaactcactgttgctataacagcaccaaggagaatggtgttaacatatgagaaaccacctccatgatccaatcacatccaaccaggctccacctccaactttggagattacaatttgacttgagatttgggtgggggtaaaggtccaaaaaaaattattctctccatcttccctcccaaatctcatgtctttctcacatttaataatataagaatggcttcccaacagtctctagagtcttaactcactcagcattaactcagaagtccaaaatagcaagtttcatctgcgacaaggcaagttccttttacctatgagcctgtaaattcaaacacaagttagttactttcaagacacaatggaagtataggcattgggtaaatactcccattccaaagggaagaaataggctgaaggaaataagatacaggccccatgaaagtctgaaaccttgcagcacagtctttaaaacttaaagctccaaaataatctcctttgaccccatatctcatattcagggcacactgatgtaaggcttaggcttccaaggttctggacatcacaagaacattccaagagagtcacaaaagaatttgtagtgtggcttttgatgctaaacagcatattagaccaagtaagtcactgaagagaaaaaagtcagaggagaagatgggtgagggtgacagaaatggaatggtgaaaggaaaggtctgataaaaaagtttaccggctgggcatggtggctcatgcctgtaatcccagcactttgggaggccgaggtgggcggatcacaaggtcaggagtttgagaccagcctgaccaacatggtgaaaccccatctctactaaaaatacaaaaattagccaggcgtggtggcacgcacctgtaatcccagctactcaggaggctgaaggcaggagaatcacttgaacttgggatgcggaggttgcagtgagctgagattgtgacattgcactccagcctgggtgacagagtgagactccatcccaaaaaaaaaacaaaagtttacccaggggctcatctggtaccttgctctgtgactaatatcttacacattttgatttactcttccactttcattttctgatgcgtgaacggtcacccttctgctgaagatgagaaaagaggctgaggcagctcaaatgagtggtctagagtcatccagctacttcatagagcttgtgtctttcaccttgacgtttgtgcacagacagaaaagagacacagaaggaaggcaaagcaagtttttgttgtgggtgatatttatgaaagttacctgtgttaggcagaataacggactcctaaaatgtttgcaccctagctctggaacctgtgcatttacttttcttggtaaaaacacagtgcaggggtgataaaattaaaatcttaagatgtagatgttattctagattatctgggtgggcccattgtaatcagaagtgtccttgtaagtgacaaagaaaagcaggggcatccgtgtgagaatgatgagcctgtgagactccactggccaatgctgggtgtgagcatgcatcaaaagacaaaattacaactaatgtagttatagattttatttttcatttattatttgaggcagctctcactctacaaatatagtgacagccctccctgggctatacaataacaaaacagtgggttttgtcaagtgggaaccagtaaacaaagccatataaataaataaattggtgaacattagggtacttcaggtcacttttctgtaaaagttaaagcagaggaaacttttattatgctgtctcaggtagagtggaatctcctgttttcaacaaaaaacaaaggtctgttctggtatctctttgcttcattaaaatttcagttgtagactgtagcatttagcatgagtggttctattttggagtctctaggctctcacttaggtgagagtgtgaccaaaatttaaagcattggcattcatctcagtaaccatcatattgggcttccatcatttataggtttatgatgtcttcctgatcacacatttctttgagtttttgtcatttcagccaaagagagaccctttggtatttgttgatggctgcacacaaaactttttaaaaacttttgtagaattcaccacaccaaattgtagaatttaaaaacctgtagaatttatcacaccagagaggctactagtatgactattgggaggataataccaaaagtttggagtatgcactttaggcaagatgcaaaccaagtaaaatagaatagatcaaagaatgagccagaagaatctagcaattttaaccaagtagtatgtttggtaacttttgtgattgagttgttatgatactcgatgtatttgtttatgtgcaacaatcagtgtcagaaactgcacaggctcctccctgttcagctggtagggaacaattttattatgtagcattcgatggctcattaaattaaaacagggaatgagaacgagtctgaaaatgtaactttaaaagggaccactgtacatttgaacaaacaattgtgttaaagatggtgctaatgtcagccattgggtggactaaatgatatcttatgtaaaaatttgagggtgacatgatatatctgtcactctgttacactactctcagaagctacttcatgtgaaattctaatgataccatcatcctgccaagtgaaagaggcaggcataagcatggacaaattaagaggggtaagagcctgattttgatgtggagacttgttctgacaacttgggaaaagcttttgacagtgtgaagttgtcaacttcttatcctggttttaagtttgagtgtctgtagttatggtgtcaaacatattggtgagctctgagtgactcatacttcagacacgagggttttcccgtgaaatttacattgagctttccacctccaacttatagggcttcaggaataaagcagattttgttcttactgattcaataagagaaaattggatgggaggaactagaagaattcagggtctagttcagtctaccggtgaataataaaaactcaaaaacaatgaacagagctgcaatttcatagcaggtatactacactttttattttcaacgttatttttctctctataagaatatctatttttaccaaagataatcccagtaggataaatttgtttccaaagtaggtttagtcttatcaaactttgccgggattctttacataagtgcatcaagagtagcattggaccacagagactcttcctaaagtttgcatcgctagacgtttttataaggagtctcagattaaacttttacaaacctcttgagatgaggaagccaaatgaaggccatcttcagactttgcctgcagtacttatgggtccattctatgtatattctcaaatataacatctcagtcaaagccttggtaatataaccaatgttttgaaatgtgtccttttgtaaagagagaagattcttactaaacttgtgcaaataactgtattagcataaacatatgaatactcatgaatagtttcccaatcctgggacagttaggtaaagagcaaaaataaatgggcttcaattattgtttccaaaagtatactttaccaaattgctttagatatagctagcttaaaagaagaaaaattccataaatctggaaaaaatcatttaaagaatcagcaaattttcaaataaaaattataaaaacattatccacattatcatttatttcaatgaaattatttttgttaagcttggcctaggttggcatatttcatgaaggcatcagcctgtttgttaaagttttggaagtccatagagagtccagtggtataatcttgaactgctcagaaacttgtatgcaagagtacttgtcagtatcttttccataaatcttttgaaatagaagcaattttggactgtagctgattgcagatgctttcaggaagaatcaaaacaactatctgtgaatcaccaacatgtaaaatgactgttgttaaaactctgataagagtttggtataataaagacagtaactccagccagtactccaatcatgatgctgacagtggccccaactgagagaccaaaagaactttcttgtcctgaagcagctgtcatggaaaaaaaaagaagagaaggaataaatgataaagacagctcacatagaaatttagttacttctgtggcatattacattctgactaacttctgtggaatatgacatgattattataataacatattcagtttctaggaatctcataattttggggacactcacatcagtaacatacccataaataaaacttagagaaggtttagcatcacttatcacttatcatttgaaaatgctttttatataatttaacatatcaaataaggtggcttttccatttagcttctgtttctcaactggattagtgagttgttgatgtagcctattaatgaagaaggacaacattatcgagaatgtgaaaaggcaacccatgagatggaaaactatttgcaaattatacatctgataagggattaattttcaaaatattatattcagaatatttcagaagaactacatatcaaaaacagtggggggaatagggagttgttcagtgggtctgcagtttctgtgatgcagaatgagaaagttctagaggtctactgtacagcttggtgcctatacttcatacagattgagtatttcttatgcataagacttaggaccaaaagtgttttggatgtcctactttttttgattttggaatatttgcagtatacttactggtttagcatttcatattttaataattcaaaatccaaatgttccagtgaacatttcttttaagcatcacatcaggggtcaaaatcgttggattttagggcatttcagactttggatttttagatttgggatgctcaatgtttactactaacatttgcatttaaaaattcatcatgagtttggacttcatgtcatgttctgacaatagtaaaatgaaaatttgcaggaaacattttttttctataagtggacactgttattaacggcccaaagatctaagatcgattgctggaagtagtattcatcttgataacataaaaaggtttaggtctgctctgaattccagttggatcacattatgctcaaagaaaggtgctgaagatggtttggaattagcaactccctgggtagtgggaggcatgtgcattctgttgggaggacaggattgatcagagagaaagtcttaggtgtgtcaattacataaagtgaggaatgacgccaaattaagagaagtgatgtgtgttatgttagtgaatttagaaagagctccctgcttctaatttctgtgcagttaggcaaaaaggggaggagcccaaaagaggcatgtgaaatgctttcatcattttctcttgatctcaagaaacactagagtttgattacatttgtttaaattgggcagagtctaagggagacgccagtgcctcatgcatctccccacctgaaggaccccacctttcgacaatggtgtcatcatgaggacacaggtgtgtgtaaaactggcagcaaacccatcagacagcacccacctggccagctccatcctgtcccaggaaccactactattctcattatgtgtatgttacagactttgaagtggtcccacaactccaaaatataaaatatgctattgtcaatacaaaatattggaaagaaagctggataagttgttccacttttttcgcattctttttaaactttgctgtttccgttttagaagtttctgttgacacaccctcaagctagatatttgttcctcagttgtgcccaggctaccaggcttcttcatttatagacttttttttatagcattgtttaaagttctttcttagaatatccatctctctgcctacatcacccatcttttcctgcatggtgtctactttttccttcataactggtaaccagagttgctttaaattttcagtctgataatttcaacatctctgccatatctgtgtctggttctgatccttgctctttcaaaccacattttttttttttttgccatagcctgtcttgtacttttttctgttttttttttttttttgaaagccagacatgatgtactgggtaaaaggaacttgggtgagccggccttcaatgatatagtggtgaatgtggggagggaggagttctgtggtcctgaatgaggtctgttccctgggttgtgaatgtcacaactgcctctcagtattttctcctccttaggtgggatatgatggctagagggggctggagttggacattttcccttcaccaggccagttaagcttccatcaaaccccagctgattcggctatggtaaaacaatctttatgaatacaggtcttgccaggaagaattgaattcactgccatctaagtggttcctccccatcccccacaagaaagatgaggggaattttattgaatattcactgtgaaaacctggtatagttccaggaagtgagagccataaaattgtcctcctaatcccatacctgatccatctgctggagtgtttaactctgtgccttgtccacattgagccttcagcaattcatcagttacagttcagggtttttgactgtgtctggataaggtcagccggtggctaggatgcaaaagacaccccactgagtttctgggcctgggtttctgctcaggtaagacgtgctgctctgtatttacctgtgggtctctccaatttatgggggagttggctctgagaccttgcttctctgagcggtcgaaaagagtttttgatttttaagtttattcatctttctacttgttacaactgagtgacaaccacagcaggatgaggttggagtgaaatgggtaaaataagcctgtgggcattggggactgtagacatgtccttcctctgatcccctggtgagtcagtggagagagtgaaaccacctttgcaaagattacagcagcgagatggagctagtatggcagacttcatcttacctctagctggaggctggctgtccttgctcattcatgggcataggccaggttaaccatgggaggaatttagtttacagtgtaattttgaagcaagaatgataatatccccttactaaaataaactccctcctactcaaggatggtctttgtcaaagtaatacaagaccataacattaggattataggagggaccaaaatcctgctaaaatgtagtcatagtttctataatccattattgctcaggagtcatgtggccagcagtcacaagacttgtgatttctttaattgctcctatagataacatcactattatagattatgagattggtcttttgagatatttctcagacttgcattctggcaaccagctggcctcatccagacccgtgagcaatgcctccagtcatgtggcccccagtcagaggcagatcaaacacacagagacgatttcccccacctgcatgatttcattcccatccaatcaccaggacccattccttagacctcaaactttttgaaaaactccaaccctagccattggggaggttgatttgagtaataataaaataagctcctgtttggcagccttgggctaattaaaatctttctttactacaaatcaccctcttcataaattagttttgcctgcgcagggagcaggatggacctgtcggtcttcctgtcaggtaattataagagtggatggagaaaccactcatttctatctggtggcctgttccatgagtcagcctctcagaaggaaagagccctggaacaggatacagtgaaagctcattctcctggtgacctgaagacaatggctcataatggagcctggcggaagtggcaactctggctaatttcagtgttttttttgggggtggggagggggtgcagtcaggccacagtgtgagcagaaaaggagcagaatagtcagcttttgtctgaggaagtccaaagcatggagaaagatgtgctggacagggcatgccagctagaatgaaggtggagccgggggcagaagatgagggacacagaggagcagagggagccagagacacccatggcagggagcagtgaccccagtgaccaggggcccccagggtctcagttcagtaccagggatccctgaaagccctcccatggcctaggaaccctggagtcacatgagacgaggtagctttagggacagggagtaagagggaaggaacatgggtctcagcacccaagtgatagggaacaggtgtggccagaaacctctaggattctgcatccaggatccggtccctaaagaggttatgaatcattcattccttcattcaatggctccttccctcatgtgagaactacagagtgtgtatctcacactgagcctgtgttagtgtgaatggggagagaaagccaagtcctctcctttattctttcatgggaatgatactgactctttggaaaacacaggatttcaggttccatgaggaggattaggatctgagggaaaggtctggacattcctcctactggctctgacagttgaggcaggtgatttagttctggagtacaaacgaatcagtagtccatttgctctcactcctctgaggtttggatgcctaagaagaaaggatttgagccgacagatgaccatgggctccttagaacttaataagacctcacttctcatggaggagaggatggaggtgtggttacagaaagacctcgtgtgactctgatctgcccctcatgtttgtgtgaccctggttcagtgactgtgtctccctgtggctcagtttcctctcaatcatataagctaaatggtaaatggtctgtgacttgtcgtgttgactctgaatgaactttaaattattcacagtcacctgacctaacgcttggcatagaggaggtgttcacacaaacagtgtttattatttgccttcatgagtgagcaccctcagacctgatccctgtggacaagttgctgccgggaacatcttgtctcttctatttctgtcccaggggacactgaactttctatggggtctcctaagcctcccagggcagttggctgatagcctaagaagcttgtccatctgttcactctgagtctcaggtgaaagagaaggctctgtctttgaccagatgaggctcttggggctgaaccctgcctgggagcagctccagagccacatccatcatacagctggtcaatacttgctcccagtcagtcctgctcaggaggccacaacccagccctggcacaggttttccagggtcacttggattcaggatctgaggactgggttctggggccagggcttctaggcttctaggactgagcttctctataaggatcccaggggacccctcaaaccgggccctgatgtagttctccagggtctttttccgaatcatgttcatgggaagtgcacagggtgatgggctgagactgatctcctcctgctgagtttcccccatcagattgtcctttctctgcagcacgtgtcttcagagtatggatgcaggaaatgaattctgatccattgaaatttgtctaccctgtgtgtgtcctgcactgaatgcccaaacactaaaatgggacataatgcagagggggacacaggcacagcccaggcctaacaatcctgtgggtgcgtgaagtagaactgacccccaacacccagaggtcatgaattcctcacggtgtacacggaaatatccagttgcttcttcaatggtaaaatctgtctttatgatttgtagggtatagaatcctgtgtcatcctgggtgactttccgggtcagcagggatgcattggcaaatattacctcctgactactgtatgcaggtcctgagctagatctttgaatgcctgttgcatatcctaaaattcaatagtagagatccacacttcttcctttgtgccaattgtagcccatcactttcaggggcagattgtgggcaagtagaaaaaactcctcctcctcctcctctgtggcattgaatggcatggcttcagtagtgactctggcagtggtgggtgggttccagaaggttaaaagtgaggctaggatggggagggagcatcagtcaatatcaaaacctatgtattgggatggaaagttggggccctttgtccttagaggttctcttcacccatgagccttggagagagagagaatgtgtgtgtgtgtgtgtgtgtgtgtgtgtgtgtgtgtgtgtgtgtgtgtgtgtgtgtcctgctgggtcaaggtcagcagcatgacccccattccttcaacacctctgaacttggcatttccctgtgtggaatcctcttccccaggggtctgcatggttccctttccactgacctcatatcctgctcacatcagggcatccttgaaagagccctttcttgacacctccactagagattctgggtcttccctttctcacttttccctgctcagttttctccagggctcttgtcaacacctgacctcacattctagatatccttgcgtgtctcgctcccctccccataacagcatcaggttcatgagggcagggacttgtatgatcttggttgtaccgcagtgcctgggacatgctgtggactcttgtgaatgagtttgtgagcattcccagagccctccaaggcctgtgatttatttcccaatttctgaagttggtggctgatgacaatgccttataccctcactatgtttttatatgaagtgttatctgatatagttattatgatcatttttcaaaatgtagtggccagtgatgattaaccgggaatagagaacacttgagatttgtttgcttcttaccataaatttcagttcaatgtgattttcctgttttaatcctgtcccttctggtgtcctcttttctgttaaggcagcagtagaagctctaagtcctctttccccaggagccccattttccccaggagacccaagccagtccctgtgccttctcatttcctcttcaaggaagttctctcctcacctgtgaacatgagcttctgccagaggatgtgccatctggagaaagggactgataggggggcaccatggtctgtgctgcctgcttgtcctcctctgtggagatgagcctgggatccggaaagtttctgagcagggctgtcagctgggctgtccttccaccttctatgctgagcctcttcctggggcaggagcacttctcaggctcatgggtggggtctgtacccaggacacctctctgtgccctcccctctcagtcctgcttccttgtccctcctttctgtttctcttctgtctgtgtttcaggcccctgggaattgctgagtcctctgcctccttcagcagtgattctctcacccaacctctacacacactatgtgcagacacacacacacacacacacacacacacacacacacacagacatcctttaggtttggtaagcacagccctgggccctcagtgtcctcccatttccattgctccaggtcagggtgcacagtcgctccccctgccctctcccattcccatctggcttttctcttcaaagcaggaggctgggctgcaccatgaccctgtcacagtgatgcaccctcaccttgctttgggtgggctgagtgctggctggtgagaaggaccctccctctctttcattatgttgaactttgctacagcttccatggttagacattcgatgacccggttgtccaagagggtattttccttcgtggaggtgtgcaggatcaatctcttatgcctcctggtaggaaaggcctgtgctgattggtcagtggggcctatgggcccagtgttcaccagggacaggtctcagccactctcttggtccctgggttctggtggctgagctggggtgaggcccatccattttcttcctgaccatctttggtgtcctctgtccttggcccagctgactgtcctgtggtcaccccaccttccccacggctggtgcaaaagggagtggggtgatgcccagggtccccacagaacacagctcttcaagacccagagagagagactgggaaagaacaggggctcagagctggagagatttctgcagacttactctgcagccaggatgggcttagcccttcttgctatacatcccttggggttcctcttgagggattgaggcagatcaagctcctctgtgtagaagaagaacaggcagtggctggagagcctgcgtgaagggactttgctcacacctgagagggtgtgtgggggtgggccatgttctgagaacaaaaggagctcataccccccacttcaccttccccatgcacaaaggacagccctgtcttccctcccagcttcacgagagacagcagggggcagattgtgggtgagtagaaaaacctccagcaggtggccacatcatggatggtgcctgtgcgtgaccttcaaacaccctctgcacctcctagcgtgcaatgggcaggtcatagggtgcctggctgattcctaggaatactgtgggcactcaggcagctgctgttctgtgtcagcactgggatcagcctgggataacctagagaaccgtacagagggagtggggtgggaatgtagggagcagtcacagaaaaagttgataaggatggaaagaggtcacaagggtaaagtgcctaatatggcatcatgtggaccatcgctgcccttgcagatgcccttttggctgggtcagcagcccctggggagtcttgtggctgggattctgccatcctctggtgaacatgggggaaatttggatgacagcagccccaggcaaggctgcatgttttattccatgtgaatctgcacatttcacagcagattattcacctatgtcacagatccatcacattccagccccatgagtctcagtctctgtgactgtaagttcactatcctccctctatcacaatcagatgtcccaaacacagatttctgtcacctgtgagtttgtgtttgtgtgcagtgggctgcactgtgtatgccctggggacagtgatgtctgggtggggctgagcactgggcagaggtttggaagcagaagagggaggtgcagggcaggaagatcaatgacagaggagcagagagggagcagggacaagtcatctttgtttctcactcccaggggaccaagaatgcaggaccctgaccttagggctcaacaccacacactgttggtgtccgtggatgtcaccagtgctcgtaatttcatgttgccttggcattcatttattaaggtgtaagtttacctgctttatatcagaggcagggcttggtcaccgtgacagttcccaatactgtacctggccaaatggctgcagttggtggccagagataaaatcttagaggcatctctcctgcttagtgtgctgggctccccctctacccagctgcttcctttaaactgacggttgtgaaatttgccctgaaatttaaagtgaccacctctcagtcacagcgtggtcacctggccccagtgtttgcttgctttaaactcacccattaaagctttctgctggaaacctcagctaacgccttggacccactaaagccattggcctacaggtccctactttcctctctgcctggactccttgacctctgtgtctattatctctaggtgtgccatgtgctcctcagagtctgtaaatagcaaaaaaaaaatttgtactttcacattgtggttgtatcactatagcctcacctgccatctggtgcctgacattgaggctgccccatgggacccatgctggttgagcccctgctggagctcttttcttggggtctctggtgctgctggggacaggcactgtcaggtgatttgatggagaaatggaagagttttattcaaaacagtgtgtcagatgatgttttcatgggcttcagctgctgtaacaaacaccttagtctgggtgacttaaaatttagaaatctatttctcatagttctggagcctgggaagtccaagttcaaggttccagctgattcagtcctggtgagggcttccttgcagattcctgctctcttgctgtatctgcacatggtgcaggcttgaaggtgggtggagagacagaaagaggtagagacccttctcccatgttttcttctatttataaggtcattaactctatcatgaagcctccacttttatgacttagtcttactgtaattatctcccaaaaatgccacctccaaatttcatcacattaaggatgagggctttaacaattttgagggggcacattctgtctggagcaggaaaggtgggagctccttcccctcctgttcatgaggcctgaccttccctggtgagataacttcacattcagtctcattctaggttgcagctccacagagcctgggttctcctctgctcttctgcccattcctgggttttccttcttgcaccaccttctccctgtggccccacctgctcctgttccaggcagctgtccttgcgttgctgctctctcaccatctctggcctcactggcctctgcctttttttttctcagccctgaggccagctccatgggagggaggaagggtgaagctgggatgggttctgaccaggttgctgcccgctatggaagcttgacaatgagggacgctgttgtgtcaccatggaggagtccttaggaaaaggctatttctcaggggtgcctggatcaaaaggggggtggcacttttaatttagctggatctgtgaactacagggactctgctccatgtcagcaaccagcacctccaacttttggtttctctctgtagctgattgtcttgcctgtgataagatcctcctcacaatgactgatggtcacagccgtgtgtggaaacttaatggagggtcttgaatgctcacacagagtgtccagggaacatgcttcctgatgttgagaacgggtgctcagtgtcataaagataaacactgagacaaaggatctctcagaaaggctagtttactttctgcagaaagggtgtcactcgctagcagtcttgccatgacagcacacacaaacaaaggagacagggtcatttataacctgacccgtccaccctactgctatgtccagcttctattggctggaacggacctcccaatttgtacttgacttgattggctagcaacttagaactttcccaaagaggcaaaggcagagaataaaggaagagaggaattaacttgtggaatgctgagagaggcaaaaacattttcaagtagggaaaggaataagcctgacctaatgcttgcttggactggttcaggcatatcagggcaaatatctaagctaaaatgtggggtctaagaacacagagtatattgatttctttattatggctggcagaatttaagaatattagcacaggtctttgagaaaattgtgcttttaagagaggttactatttattttcaattagactgggaggaaaatccctttgaagaggacctctatttatttcattctctacaattctcccctcttttattttataattactcttcaaacttgtttaatatgttttgacttaattgctctgtttgtccttttaagagaagtaatctttttgaatatggtggagagttaggaaacaattttgtgagagtagcagggacaagtttttgtataaagctttgaaaacatttttatttatagttacccaccagaacaacaaagatttaaatctcacagctatttgatttcgtgctttaaatttatctggcacttcttgcgggaccccaatagtgtttatgtaaacctgaggattaaaggatttataaagagtttctttgggcctgcagtgttttgtttttactttttttttttttaaggctgataaaatgccagggtgaaagggatagccaattggattagagcataaatactcctccaattatctggcagagtgtccagtaaaggtccttcacagtactagcatacatttgctcaggggtggctaagcacagactgatgggcaagctcctggaaaggcttgagcttcttgcatccttttatgcttccaaggaacaccaaattctccacttgccatgggaggcacgaactaaacttggcatttagaggtggaagctggattgcccttgggggctgacccacagggtgtcaagctttaggaaacagcagagagagagctcagcatgatggattatcccaagcagtgggattttggtaggatttagcctgtggtagaatcctcctcacaatgactgatggtcacagctgtgtgtgaccatatggtccatacctggttgatgaggagaccatccgagtggaaaggggacaatctgggcgtctgtgcacaagcataacaatcactgttatttaaagtgcagatggaatatttaatccattccagccgggcatttgcattttgatacattgtcttaatggctaaggtttgttttagatctttcacctttgcaatagacaccgtagttttattataggtgtaggagtaagtgggatgggatctaaaactgaggctactgaagaaggggaagatggggaataatgcatatctaaaaaatgcatagggggtgtttcccatttaggtcgatccccataccatagaagcaactaagagtaggtttagagtcagttaaggtggaggtggtgatagagagaaggacagtgttacactgataaggctggcaattagaaggcgtagtccctttagtgaggggttttagatctgcacaaacctcttccgtggaagtccaaccttgcacctgagtagtccataggatgtagtcccagctactacaaggttgccaggctataggagcagaaaattggtgtctcggctgcaggtattcacaaccatgagtgctaggaggaactatgtcaactagagggccggagcataaatatttgtgtgaaaaagctagctgtcattgatccttcacatctttacaaggtatgacagagcatgcattaaaggcaatggtctgagatgagtcagacttagttatgttaataacaaaaggagctagtaacagaataaggaaaggaaaggaagcaatatagaagggatatggaaattaagcttttggttttttttaactttaacttgttaaggcttgatcccggtacactaacctatgattctgatgaggaagatgatttcttgacttaagtatggtgggtccatcttctcttggctgtgcggatggcagtcttggtggtcaactgtacaggataagggccttcccaggcgggcacaagtttcccttctttttaccctctgatgagaacatggtccctgggttagtgctggtgagctagaaattctagcggtggtgtctgtgctaagagatcttttatcttaagagaagaaaaggtagcggagagaccaagtatataatttctgaggaactgatccttagtttcaaacataggaacattagctgaggaatgtaaataaggcaatccatataacattttatatggagacaggcctgtatccttttggggagctgtcctgatccttaataaggcaatgggaagacatttggtccatggtaaatgagtttctagaattaatttagtcagatgattcttaagggtttgatttattctttctacttgtccggaggataagggatgccagggaatatgatattcccattttatgtctagcacttgggccagctttttaataatatgtgcagcaaaatgggtttcattgtttgagtcaatattttctattattccaaacttgggtataatatgctcaattaatggttttaccacattattggcagttgcctcgaaaaggggatggcttctacccagtggttaaggtaattaattattactagcaggtgttttagccgactaatgggtggcattttagtataatcgacttggacgttttggaatggtcttaactccggagttcttcctccgaaaggcaatttcctttcagcttgtttgtcagctttcttacagatgagacagccatttgtgatctgcctgtctagaatataaatgccaatacacctaaagactctgagaatcatgtcacatagggcctggggaccccagtgagtcccttgatgtaaatgggataatacttccctcataaagggtttagatagcatctctctttgatctggaagtatgcagctttcttatgaatttttttttttttttgctttgggatttcaactaatttttctttcccagccagggagaagataggcacaacagtaggagaaggaaggtggggagttaaatgaaaaatgggcatatctaagactgcagcctttttggccatctgatctgcaaggttattccttcggctcttaagggaaaaatcatgttgatgtccaggaatgtgcatgatggctatctactttagtagctggagattatctaagacatgactaatgacttatgagcaagttcttggcccctactatttataagaccttgttcagcctaaatcttcccaaatgtgtgtgctaccctaaaggcatacttagaatctgtgtagatagtttctatctgatcctttaaatattttaaggcctgactgaaggcaaataatttacaagcttgagcagaatagctattgggtaaccatcctgatttaatttcttcgagtgtctctctatctactactgcatatccactgtgttattccccattaaacacccagggggacttgtctatgaataggtgttgccccgatctatagaggcctcagctaaatctggctggacttttgtatggtagtcaattaagttgaggcacaagtgttctgtctgtagcaacggatttcccgtcaagaaccctgcagggttgagtgagttatctgttgttatggttaagtcatttaaatcatccttttttttttaacagaatagccttatattttaaaattctggaatcagtgggccagcttcctgctttttggctcaaaatggtcttgacttgatgagatgtgctcacggtcaaataccccccaaaggttatttttctacttttttctactaatatggctgtggttgcaatagattgaatatactggggccacccactggcaacaggatttaaaatcttagacagaaaagctactggttgtcaccggcctccgtgttcttgagtgagcacccctaaggctactccattgcttacattaacaaaaaggtggaagggcttcttaagagaaggcagagctaaaactggagcagacattagtctatgcttcagtttattaatttgatctacttctttagaggaccacataagggggtcaggccccttattagctaacttttcatataataatttacttcttaatgcataggagtcgatccataatcggcagtatctaattaatcctacaaactttttaagttcttgtttgatccagggcagtggcagggacagaattccttctactcgctcaggaccaattcttcttttgctggtgctaaatggcccatgtatttgacttctggttctacatattggagcttctcttttgagactcgtagcccttcagtgtataaatgatttagaaaatagatggtgtacttatttactttctctatatcctctccaggtataagaatatcatccatgtgttaagtaaacatagctgttttgggatagcagccctctctatgactttctctaaggcatgactaaaagggtttggtgaatctgcaaacccttgatacagaactgtccatctgtattgttgcttctgcccactgtgggggtcctcccactcaaaggcaaacaggtcaggctgttttccactaaaagacatgcccagaagtcatcctctaaatttaagacagtgaactactgattactatatggaattttacttagaatagtgtagggatgggccaggcgcaatggctcatgcctgtaatcccagcactttgggaggccgaggcgggcagatcatgaggtcaagagattgagaacatcctggccacttggtgaaaccccgtctctactaaaaatacaaaaattagctgggcatggtggtgggtgcctgtaatcccagctattcaggaggctgaggcaggagaatcactggaacctgggaggcggaggttgcagtgagccaagattgcaccactacactccagcctggtgacacagtgagactctgtctcaaaataagaaaagaatagtgtagggatttggcatgattgggtgaggagtctgcactatttcattaacagctttaagatcttgcactaatcagtatgacctgttaggtttcttgacaggtaaaatgggagtattatagggagacatgcaaggcttgaggagcccatcttttgtaagtctattacgggcttcaaccctatctgcccttccaaggagataggatactatttattccttacaatctcccctggagtcttcaattttatttggattgggggaatctgtaacctccttcagtttctttcttttggccagacaccaggggaaattttgccatagttagcaaatttagtgaggttaagaaccctcttgggctaacctgttaagggaagagaccacccctcatattgtcttatgcccaatttctacttccaaaagaaagaagaagtaaaaactaaaaggcagaaatgaaatccacaggcagacagcccggcaccgcgccctgggcctggtagttaaagatcgacccctgacctaacaggttatgttatctatagattccagacattgtatggaaaagcattataaaaatccctgtcctgttctgttctgttctgattaccgctgcatgcagcccccagtcacataccccctgcttgctcaatcaatcatgagcctctcacacggacccccttggagttgtgagcccttaaaagggacagaaattgctcactcagggagctcggctcttgagaaaggagtcttgccgatgctcccggccgaataaaccccttccttctttaactaggtgtctgagaagttttgtctgctgctcatcctgctacgctgtagaccaatacctaattttaacattaaatctctccgaagtagattagtttctgctttaggaattaataggaattgaatgttacttgatcaggctttatattttaccttggcactttctaaaatctttgctttaaatccttccccttttactccagagactaacaactcctctggagaatatgttagcccagttggggtaacacatagggaggagcaagtagagcctcagtcgactaagaaagtaattgactcatggttaggtcctacctttaaatttatcaagggctcctggtgggactcgaggtagaaaagaaagagcccctgacaccccccattcctcctctttaaaggcaggaatgagcggaggagctccccctgtaatctgtcacttagggcattatctcttaaagtggcctgagtttccacatttgtaacatctatcttgccctccttttctccctattccggaacttccctgcctctgtcctttttcttctctcttatgtttacaccctttacaacacttgctgtgactgttttcccttcaaccttgattctgtcttctgttttgcatccccaggtcccagggtgtcggccgaaattttgcttctggcattgattgccctggtgaattttgccaaaagatttttgccttttgcttttctttttttcatttcatctctcctgacatatactttctgtgcttcctctaaaagctctttgatggagcgattttttcatctttttattttttgtaacttctttgctatattatgctatttgtgacaaaatgcaattttagcatcccttgtcctggggggctatctagatctaaattagcatactttctcatttgctctcttaatctgtttagaaattgcacaggcccttcatgtttttcttgttgtacatcaaaggccttagtaagattttgaggtcagggtgctgattctttaatccctctaaccgttaattctcgtaaatttttatatggtcttggtgggttgcattattattatcccactgtgggtcttgagtgggaaatttagtatttgccaccggattatcctggcgagcagggtgatcaccttcccaggctgccatagcggctgcgtggattatgtttcgcttctcttttgagaagaggatacctaggatcgacattaactccgtccaggtatactactggggacctaaaaactggtcgatctgttctgccactccttttggatcatctagcaggggcttgagctccctctttaggcctcagacctcagaggcagttaagggagcatttataaagccaatcgtgccctctccttgtggaactttttttagagggaagagctgggaagtcgattctttaggagtgcaaggaaaaggaagattctgaatgtcccttttacattgttctatctctttttggagccctctttttgaggaaggacatttagatgggcagcagagatgatcaagccactgaggcggtaattcctcgggaacagacgcctccaagtccagagtgatccctggagcgggtgggggggacgagacttccgcctgaggaggaggggaggcgggacttctgccggaggaggagtgggaggcgggagttccatctgaggaggagaaggcggcagccatacggcaggcagcagcagcgccgtgggattcagaaacgggaagataatttaaaggatcccactaactgctctgggcctttgtttctgtctgttaccgtctttaagtcatttaaggggtaaagaagggcaggcccttgctgctagcataaggcataatccattttttctggggacatggggctttggttgttaacatacattattaaaagttgacagacccaatcctcatctgaaccaaattttggccagaaaatggcaggttttaaggttggctcttgggtccagaggaaacagcaatatttaatcatctgttgttttctcttatatttagtccgctcatcctctttccaatattatagcatgaatcctaagggactatcaaaggaaatttgatcactgtcccctcccttgttgcctggtctatttcctgtcccaatcctactagaagcatttcccatgttgaatcccagataggcccaatcccttgtgctagggatgttttgcctcttcctttcccaggaaggctgaatcccccagataccggggatgtctcgtctgtcctgtcctcaaggcttaatctctcacaccagaggtgtttcaccgattctctttccctgcgaggttaaccttcctccgtttcccttttggaggttccttacactcttcccgtttatgtccacgcactctgtccagcaacaagttggtaatcgtgcacacacactcagcctcccaaaagctgaccaccaaggaagtactttgctgccctcttgcggcttttcctaccttggcccatgcacggcgttgcctggttactgtggggagtcccgcaagcctgtctctttccccgcgttgctgagaattcaagtatattcctctcaccgggtaggtcccggctctcctcctggggctgccgcaacgggcggcagggcgcctccccacaagacagggccaaagactgtcccagaggggaatgttaatctcgctggggccttcaaattgttggtaacgggtgctcggtgtcataaagatcagcactgaggcacagcatctctcagcaaggctagtttactttctgcagaaaaagtgccgctcgccagcagtcttgccatgaatgcacacacgaacaaaggagacaaggtcatttataacctgatgcatccaccctactgctgtgtgcggcttccaatggctggaacaggacctcacaatttgtacttgactcaaactactacaagtcaaatacagcaaaaatccaaaaacccgaatttaaaagtgaacaaaagactaaaatacttcccaaaggaagacacacacattgccagtgaggacatgcgaggattctcaacatcactaatacttacggatatgcaaatcaaaaccacagtaatacaccacctcacacacattaaaatggctttaataaaaacaacaacaacatgaaaccacaagtgttttcaagtaggtggaaaaattagggctctagtgcattgctgctggtgatgggaaatgttatagatgctgtggaaagtggtatggcagtttctcaataaattaaagaattactacttgatccagcaattctacttctggattctaggttgtgaatgcgttgattatctttagtgaactatagaaagttttctttatctggtgaaaatacactgtaacataataacttagtagataacatgagccctcttgcatgggagagcttttatacaaccagaaccagaaaatatgcattgaaaataacaattgaatgaaatctcattataaaatgtttaaatggaccagcaggtgaccaagtgtacctgaagctttgattgttttcccaggaatatggggccaaacattggttataaattcttttaacaatttataagtcaccacaccaatatattccatttgaatatttttatcttttccatgatgagtcatggaatgcagaacttttaataataaaagctttaaggacttaggaaggacaaggtggccatcctggttctccatgagtccatgcttaattaatattagactcatatcctcttgaatcatagtttttcttcaaattatgtgcatagcactgataactgatgggttatcataggtaatttgacttagaccatgacgttcattcaaattgtatatctaagtaattttaatgtcagctgatgtagcatgagtgctgattggttaggtaggagatgaaatcatgggaagttgaagctgtccttttttgctgagtcagttcctgagtagaggtcacaagatcaaatgacccattttatcgatctgggtggggccagctcatccatccatcaagtgcagggtctgccaaatagctcagacagatctcaggagcagtttagagagggtcagaatcttgtagcctccagctgcatgactcttaaaccgtaatttctaatcttgtggctaatttgttagtcccacaaaggcagtcttgtccccaggcaagaaggaggttcgttttgggaaagggctgttatcgtctttgttttaaactgtaaactaaattcctattaaagttagttcagcctatgcccaggaccgaacaaggacagcttggaggttagaagcaagacggtgttcattaggttaggttagatctctttcactgtctcagtcataattttgccaagatagtttgaggagaatcaaattttaaagaaagacacataatagtgtcacggctagccttaaatattctcttgactaacttacagagcaaaaatctagccttaaacaaagttaagttttttgtaatctcaaatgacttgctttagatctcctgaggcaataaggattaaagccacttcaccatgtcatccagtagttaaaattccacactttcactgttgcagcctggattcaattacaagtcagagaatgaaccgcttttgttacaggaaaaaggtcccaatccatgcccaaagagaggattcttggatcttgcacgagaaagaattcagggcaagtctgcagcgcaaagtaaaagcaagtttattaagaaagtaaagtagtgaaagtacagctactccatagtcacagtaggatgttcttgaaagtaagaggaggcacacacccaccctaggtacagtgctcatatatatggggagatgtaccctgctacaaaggtttgtgataaggattaattttcttaattgtgatattttgcaagaatctaagttattatctttaaagcaaaattaggaatcactttgttttccagatattgggatatctggacactcccaagtctgggtctgtttagtaaatattattgatttgttcccttaaccataaacatctagaggctaggaatgcctcactttctggaaatgcagcccaacaagtcccagcctcattttcccagccctcactcaagatggagtcactctacttcaaatgcctctgccacttttgttttgatatttgtgtgatttttgagtttttgtggtactcatttacatctttggagatgtctcatgcatccttggctaagtcacaattatggttagtgcttatcagtttcagctgggaggatacttttggttaaaaaaaaattcaaaagccagaaatatcagctgtttgtcctagctaaaatctgataataaaaaatctgaaagtattacagtgggtagctagtcagacatcagcaggacaggagggagcctccttcccccacacaccaggaatgtcatgaccatcaggtgattgtcaggtggtcgttaactgtctctctaaaataataatgggttgtagctagcaccagggaaaggcagtctcccaatagacaggaaacacctgaaacagttgatcagctccttcctgataagttctcagaagttgggtgagtgggctaaaacatgtgcattaagaggcaaaatggtggagtttaactggtttgtgacctcccagggacatttgactggaaagagaagaacacctcaagtgagcatgcatacaactccagtaaatacactgcgcatgttcaccccaccccaagtgctagcaggccactgcacatgcagacagcccactccaaagggaaaataaggggagaggagatgcagaccccagaattatgccaacatacaaaagcctaagtcagaggtcaagcaatgcacttgatctcttgttgcctgcttggcttttttatttttttatttttatttatttatttttttgcaacagagtcttgctctgtcacccaggctagagtgcagtggcatgatctcagatcactgcaaccttcgcctcccaggttcaaatgatcctcccgcctcagcctccctagtagctgggactacaggcacatgctaccacacccagctaatttttgtatttttggtagagacgaaatttcaccatgttggccaggttggtctcaaactcctgacctcaggtgatctacccatctcggcctcccaaagtgctaggattacaagtgtgagtcactgtatccagcctgcttgactctcttttaattgtactttacttcctttaattcctgccttaaagcttttaaataaacttttactcctgctctaacacttacctcagtcccttcttctgccttatgcctcttagtcaaattacttcttctaaagaggcaagaattgaggttgctgaagacgtctacagattcactgctgctaacatgctttggtgtcatttctcagctatgtttggcagctaagagaaggatttcccaaaacagctctgtgattaagagtcagcttaattaaaaactggtatttaagccatatatttattaatggtatttaagccatataattattaatatttataatattaagccatgtatatattaaaataatatatatataaaatattatatatatatagaatatgtatatacacagaatatataaattcatattggatatatattgagaaaggacttgaatgtatattgaaggcttttctgcttttctcttttgtatctttttttttttttgagacaggctgtcactctgtcacccaggcttaagtgcagtggcacaatctcagctcgctgcaacctccacctcctgggttcaagggattcttgggcctcagcctcttgagcagctgagattacaggcacgtgccaccacacctgactgatttttgtatttttactagagactgggtttcgccatgttgctggtcttgaactcctggccttgagtaatctgcccgcctcagtctcccaaagtgctgccattacagatgtgagccactgcctctggccatctcttttgtatctttgaaagattttttttcagttgactgaaatctttttaaatcatgtgcttagtctgtctggtttttttcttaaaaattctttttctgcttatttctctttccatccttcctcttgctattcttgatgccacatgagggaacctaaagaatttctgacagcctggaaccccttaaggaaaacagaaaagatgccacagacttccctatttaggagaaaccactgtttttcctcatggaaccccaagagttgtaagtaaatggattcctctcaggtctaaaactctgctctcttttccattttccctgacctctttggcttttgggggcatcagagattactttgcactgtaaaaatgcttgaccttatatgtgtgatggctgctgggtcactggtaagagctttggttttggaggtgactaacagcgctcgcaataaatgattattacttcagaatgctactcatttctttgcaagtttagataagaaatacacagtttaaataattagaaaaatgcccttatagcaaagtacactgtggaagtgttgcatagtatggttccattggcattttcctcttctcagggacctgggattcagtgaaatccttgatttataaaggtctggatgctgtcccttgcaactgggtcttctttttatgtatttaaattattaggatctaaaagttgcaagacttcgttggtcctcttccttaatgggctctgtcctgagctcagtggtccagttggaaaacagagaccaaattaaaagctgcctatctaaataaaattggtctccttataaaatcctatggtaaatttctgtcatttttgtgttaccttggcatctatttttaatcttccttgaacacacacaaattccttcttgtaaaagctttagttctctttctctctgtgctttgagatgtaaatttgctaccaattttctctaaaactcaataaagtctggcttaattaaatgttaacctcttccatttacaaaggcacaaatttaatccaactgtcttttttaaatactgaatttgatcggtcctatgctgaaatcaaaactctaaactctttctgcctccctctatctttatgtgcacatgtgtatgttatatgctgtatcacatatatgtctatgtccatacatatgattatatgttgtttacatacatggtatcaaattaatgtaaaaataagtactcataaattaagtaaataatcccaaatgcttttcaatacatgtgattttagtaatctttggtaaataaagatagtttaaaaattattggtaaaatgaagtagaaatgtcttcagatttaatttagacatttgtgcctgggtctgttggcagacatttttatattgtatttactagatgttttagggtcatcatatggttgcttctgtatatatacattttcttaatttttctgtgaccttatatctttagatttgagcctttagattctgagttctagatgagcgaccatagcaagaactggggacaaaactcatcccatcccacagctgtgccttttggccatgctggaagagattagattctccaggtataatcttcatagctttgctgtttatcttgggctttacacctggtaactagttagaattgcttacttcctgttttttctctcctgaaaataatgctgtatttgtttgttctcacattgctactgagaaatacctgagactgggtaatttataaagaaaagaggttgaattggctcatggtttggcatgactctcacatttgctcagcttttgaggaggcctcgggaaacttacaatcattgtggaaggccaaggcagaacaaggcatctcacaggtgagagcaggaggaagacagcaagggttacacactcttaaccagatcacctgagaactcactgtcactaggaaagcaccaagaggaatggtgttaaaccatgagaaaccatccccataatccaatcaccttcaaccaggctccacctacaactttggagattacaacttgacatgagatttgagtgggaatataaatccaaaacatatcattctttccctggtttctctcaaatctcatgtctttcttttcatacgtgtccgtgtgaagagaccaccaaacaggctttgtgtgagcaacatggttgtttatttcacctgggtgcaggtgggctgagtccgaaaagagagtcagcaaagggagatagggatggggccattttataggatttgggaaggtaatggaaaattacagtcaaagggggttgttctctggtgggcaggggcgggggtcacaaggtgctcagtgggggagcttctgagccaggagaaggaaattcacagggttaatcactcagttaaggtggggcaggaacaaatcacaatggtggaatgtcatcagttaaggcggggcagggccttttcacttcttttgtgattcttcagtaacttcaggccatctgggcgtatacgtgcaagtcacaggggatgcgatggcttggcttgggctcagaggactgacattcctgccttcttatattaataagaaaaataaaacaaaatagtgttgaagtgttggggtggcgaaaatttttggggggtggtatggagagagaatgggcgatgtttctcagggctgcttcaagcgggattaggggcgggtgggaacctagagtgggagagattaagctgaaaggagatcttgtggtaaggggtgatattgtggggttgttagaagaaacatttgtcatatagtatgattggtgatggcctggatacagttttgtgtgaattgaaaaactaaatggaataagaaggagaaaaacaggtataaaaggtctaagaattgggaggacctaggacatctgattagagagtgcctaaggagattcagcatagtcctgccagcaaagattatttatttacttcaagagttaagagtggcagtttggggatagcacgaggagatatcagctgtgatggcttggagaaacagtgtaaactggcagtgtgaacaagagcagggcatgtgtgagtagttgagaatggagaataggaatatgactagacagaaaatagtagggatgacaagttttcttgggggcacagtctaagttggtccagtgtctggaatgagactggggcctaataaaaaggagcatctatacaggagcttaaatgggctgtaccttgtagcattctgaggacaggcctgaattctgagaagtgaaagtggtaaaagtattgtccagtcctttttaagttggtggctgagcttggtgaggtgtgtttttaaaagacctttagtccgttctacttttcttgaagacggaggaccgtaagggatataaaggtttcactgaatactaagagcctgaaaaactaattggctgatttgactaataaaggctggtctgctatcagactgtatagaggtgggaaggctaaactgaggaattatgtctgacagaagggaagaaatgactgtggtggccttctcagaccctgtaggaaaggcctttacttattcagtgaaagtgtctatttagactaagaggtattttagtttcctgactcgggcatgttgagtaaagctaatttgccagtcctgggtgggggcaaattctcgagcttgatgtgtagggaagggagggggcctgaataatccctgaggagtagtagaatagcagatggaacactgagaagttattttcttgaggatagatttccacgatggaaaggaaatgagaggttctgagaggcaggctagtggcttgtactatagcatagcctgcatttgctggtatgtggcgattaggcctggtggaactgccatcaataaatcaagcgtgatcagggtgaggaataggaaagaaggaaatacagggaaatggggtgaatagcaggtggatcagagagatacagtcatgggggtcaggtgtggtatcaggaataatgtgggaggccagattgaagtccgggccaggaacagtggtaattgtgggacttaacaaagagtgagtacagctgaaggagccggggagcagaaagtgtatgcgtcaggtatgaggaagaaaatagattttggaagttgagaaatgtagagagtgagttgagcatagtttgtgattttcagggcctctaaaagtattaaagcagcggcagccgctgcacacagacatgagggctaggctaaaacagtaaggtcaagttgtttggacagaaaggctacagggtgcggtcctggctcttgtgtaagaattctgaccacactaaccatgcctaggaaggaaaggagttgttgttttgtaagggattgaggtttgggagattaatcagacatgatcagcagggaaagcacgtgtgtttttgtgagaattataccgagataggtaacagatgaggatgaaatttgggcttgactgaggtaatgggggctgtctgtgaagccttgcggcaggacagcccaggtaatttgctgagcctgatgggtgtcagggtcagtctaagtgaaagcaaagagaggcggggacgaggggtgcaggggaacagtgaaaaaagcatctttacgatcaagcacggaatagtgagttgtggaggaaggtattgaggacaaaagagtgttcgggttgggcaccacaagggggataggcaaaacaatttggttgataaggcacagatcctgaactaacttgtaagtcttgtctggttttaggacaggtaaaatgggggaattgtaaggagagtttataggctttaaaaggccatgctgtagcaggcgagtgataacaggctttaatccttttaaagcgtgctgtgggatgggatattggcgttgagtggggtaagggtgattaggttttaatgagatggtaaggggtgcatgatcagtcgccaaggagggagtagaggtgtcttatacttgtgggttaaggtggggggatacaagaggaggacgcaaaggaggctttggattgggaagaagggcggcaatgagatatagctgtagtccaggaatagtcagggaagcagataatttacttaaagtgcctcagcctaataagggaactgggcaggtggggataactaaaaaggagtgcttaaaagagtagtgtctaagttggcgccagagttggggagttttaagaggtttagaagcctggctgtcaatacccacaacagttatggaggcaagggaaacaggcccttgaaaagaaggtaatgtggagtgggtagcctccgtattgattaagaaggggatggacttaccctccaccgtgagagttacctaaagctcggcgtccgtgatggtctacggggcttctgaggtgatcaggcagcgtcagtcttcagccggtaagccaagaaggagtcagtcagagagccttgggcccagagttccttgggctctgggagtggctgccaggtgagttgaacagtccgattttcagtggggtcccacacagatgggacgcggcttaggaggaatcccaggctgcgggcattccttggcccagtggccagatttccggcacgtgtagcaagcgcctgggggaggaggttctggaggaacgcctggttgctatggttcaggcgtttggaagttcttgtgtgctggagatgtggctggggtttgtctcacagtggaggcaaggaattgcaacttttttctgttattgcacaccttgaaggtgaggttaattaagtcctgttgtggggtttgagggccagattccaatttctggagttttatttaatgtcgggagcagattgggtaataaaatgtatattgagaataagatggccttttgaccttttagggtctagggctataaagcgtctcagggttgctgtcaaacgagccatgaactgggctggatttttatacttgatgaaaaagagcctaaacgctatctgatttgggataaagaaaaaggagcattaaccttgactatgcctttagctccagccacctttttaagagtaaattgctaggcaggtggggaagggctagtcacggaacgaaactgtaagccggaccaggtgtgaggaggggaggcaataaaaagattacagggtggaggagcggaggctgaggaagaattgggacctagcttggcctggcaaggaggggagaggtcagatgggtctgtagaaaaggaagattagaaagactcagcgacgcttggggttgggactgaggggacaggcgggagatttgggacgagttgcactgggcacagagactaggaagggactgatgtgtaaaagaatgcctggacgtcaggcacctcagaccatttgcccattttacgacaagaattatttagatcttataggatggaaaaattgaaagtgccgttttctggctatttggaactactgtccagtttgtattggggtcaagcggcattgcagaagaaaatgagatgcttagattttaggtcaggtgagaattgaagaggttttaagttcttaagaatacaggctaaggaagaagaaggaggaatggaaggtggaagcttgcccatagtgaaggaggcaagcccagagaaaagagtagagacatggagaaggggtgggggtttcttgcccaccagaaaagcagagaaagggtcggagcatggaaataagggattggggtgcagacataagaggttggggcatggaagtaagggattggggcacagagataacaggttggggcgcggaaataagcaattggggcacagagataagaggttggggcatggaaataagcgattggggcgcagagataagaggttggggcatggaaataagcgattggggggttcttgccccctaggaaagcgggacttaccgctaagggtgaaggagaaggggttgagtggtacttgcccctgccccaggaaagcagagaaggggtggagagaaggagagaaggggttggggtacttgccccacccccggaaaagcagagaaggggtagagacaaggagagaagggttggggtacttgccccttccccagaaaagcagagaaggggtagagacaaggagagaaggggttggggtacttgccccttccccagaaaagcgggacttgccgctaagggtgaaggaccaagacaggcgtccctgcgtggtctgacacctttgaaacgtgggtgaataatcagagaggcgtccctgcaatgattaaacaccaagggaaagctgccttcccagtctgtgaccggcgccggagttttgggtccacggataaaacatgtctcctttgtctctcccagaaaatgaaaggaattgaaattaagagaagggagagattgaagagtggaaaggagaaagtggttgagggacagtgagagaggttggagaagagagtaagaagagaccgcttacctgatttaaaattggtgagatgttccttgggctggtcggtctgaggacctgaggttgtaggtggatctttctcacggagcaaagaacaggaggacaggggattgatctcccaagggaggtcccccgatccgagtcatggcaccaaatttcatgcgcgtccatgtgaagagaccaccaaacaggctttgtgtgagcaacatggttgtttatttcacctgggtgcaggtgggctgagtccgaaaagagagtcagcaaagggagataggggtggggccgttttgtaggatttgggaaggtaatggaaaattacagtcaaagggggttgttctctggtgggcaggggcgggggtcacaaggtgctcagtgggggagcttctgagccaggaaaaggaaattcacagggttaatcactcagttaaggtggggcaagaacaaatcacaatggtggaatgtcatcagataaggcggggcagggccttttcacttcttttgtgattcttcagttacttcaggccatctgggcatatacatgcaagtcacaggggatgcgatggcttggcttgggctcagaggcctgacatttctcacatttcaaaatgtaacaatggttttccaacagtccattacctctttccagcattaccagtaaagtccaaagtcccaagtctcttctgagacaaggcaagtcccttttgcccatgagcctgtgaaatcagaaacaagttatttacttccaagatacaatggggatttaggcattgggtaaatactccaattccaaaaggtagaaataagccaaaagaaataagatacaggccccatgcaagtctgacacccagcagcacagtctttaaaactaaagctccaaaataatctcctttgaccccatatctcacatttagggcacactgatgcaagggttagactcccaaggccctgagaagctctactcctgtggctttgcagggctcaaccctcatggctactctcatgggccggcattgcgtgcctatggcttttccaggtgcagtgtgcaagctgccagtggctcttccattccagggtcttgaggatggtgggtatcttctcccagctcctggcccagtgaaaactgtgtggagacacttaccccacattttgcttctatactgccctagtagaggttcttcatgagggcactgcccttgtagcaggcttctgcctggacattcaggcttttctatatatcctctgaaatgtaggctcccaagcctaaactgttgcactttgtgcacctgcagggttaccaccacatggaagctgccaagctttatgacatgtaccttctgaagcaacaggccgagctgtaccttgacccttttgagccatgactagagcagctgggatgcagtgagcagtgtcctgaggctgcacagggcagcagagccctgggcctggcccaaaatttattctgtcctcctaggcctctggtcctgtgatgggaagggctgctgcaaaggtctctgaaatgcctttaaggccttctccttattgttttggctattagcacttcgctccctttacttatgcaaatttctgcagcctgcttgaattcctcccctgaacatgggcttttcttttctaccacatgctttcctacacactttcagaaaactggatctcatgagaactcactatcataatgacagcaccaaggaagatggtgttaaaccatgagaaacattagtttatttgccaatgtctgaggtaggcaggtgaggacagcgtttgtgctgttgtggaaatgtgttctgaacagggaccttgaagtgaggtggaggaggtggccaagggagagaacactcaggaccccagatggctgctgctgcccaggacatccccgcctcttatggatgttacccagattgtagcagggagaggcttcctttaagtagagagtaaacggactaagaaagcgatagatggctccacatgccaagaatgttcttttccttttctctcccttttctccctctccttttcttttcatgatatcaaatgccagagaggcgtgcagagcacgtagggggccttccttgcgttgctgctacccaagcctgcctgggctgtaagttcccccggagcacccctttgcccccacctgtggcatggtcggcctctcttgggcccaagcctaccctctgcttcctcagagcgggtctcagaccaggcagggggtttcccaggagtccctgggaaggtttgttttctgcagtgccatggtgacataaatggttgctttccttatcatttttcaatatttagtggccactgattactgccttagaaacacggagcaattgaggttttcctgcccctttccaattccagttcaatgtaattttcctgctgtgactcctgtccctctctgatgtcctctcccctattcaggcttcaacagaagccttctatcccctctcaaagctccgtcctccccaggagacaccagccagtctctgtgcttcctcctcccaccctctcccagggagtcctccctcacctgtgagcaggagcccctgccaggggatgcatcctctgcggggaggggctgaggggggcctcatggtctctgctgcctgcttctcttctgtggagaggagcttagctccaggatgatcagagctactgtgactgccagttctgctgtctttcctccctctgtgctgagccttctctcagggcaggagcacttcctagggccaggggcaggggcgggactctgcccaggatgcttctctgtcccctcccctctcagtcctgccttctggttcctgcttccccttcccttctgtgtgtgtttggtccttaggacctgctgaggccatttgccttcttcagatatggctctccttccacacttgtccacacacacacacatatacacacacagagacacacacagagacacacacagagatgcacacacacatacacacagacatgacacaaacacagacacacatatatacagacatacaggcaaacacatatacacatatatacagacatagaggcaaacactcacatatacagacacacacacatatatactcagattcattgaaactgagacacatgtacacatacagatacacagagctgtcacaggacaaactagcacagataaagacttcaagtggctttatttgccgtcctaaaatcgggcgagacttcatcccatgagacaatacgtgggtcaaggagctgagcagaagcgcgggtttaatagagaggggagggctgcggaaagcaaacacaaaaaacagggccactcgggaaaggctcatggaacaagggagaaatctctgatgggggagaatcaggttcctgttttagaaacggtgagagcagaggggaggtcattgtcatgcgattgaaactggcctgtttgggaaatcggctattatctttcgaaggtcaggtagcagctcagttttcctttggtgacctgtgacattggggaaggactgcattgtgctgttggtctggtctgttggggcctggagcaggagctcagccactgccatggcctcctctgactgctgtttagcaaagctctcaggtggggctgatggcgctgtcctggggaggccctttcagtagcaaggctggtgcaaccctgtcccctgggaggatgacccgccctccccagggctgacctctgctatctcctggcctcaggtctgtcagctccacacacagaaccctggggatccaaacctggggaattctttctttgtgatgcagaaacccagctggccaggtctccccatgctctttagtgcttgggaaggtgggatgatgcccagcaggaaggtgacagaggtggctctgggggatagaaaggagctcactgggggatgactggggagggaccagccctctgtctccagtgtcaccagcctggcctctgacccaaagagacccaggctggactcaggtggagctccagctccagggtgtggaggaagttgtcctgtgtgtcctgggtagagaggactgtggtggagggaggtgggtggctctgagccctgctgtccttggggaaggcttcatggagaccctccctttctgtgtctgttggctgagctgtggctcagggcctgtccatgttctccctatgttcaccccttaaccttgcaggtggttgggggggcgagagagatagaaagactgtgtctgtctgtgtgtgtgtgtgtgtgtgtgtgtgtgtgtgtgtgtgtcctgtggctaccacaccttccccatgggtgatgccaggaggaagtggggagctgcacaaaaacccttggcagagcaggcaccatgaaggagcaggcacatggcagggaccagaagggtcatttggggcaagggctggaaaccaggctccacctctacctccttagcaaagccaggttcctgtccaggggaatccatttcctgagtgttatctgtgtgtgatgtcgccccctggagggcaagaggagacttgtggccttgtcaggggctgccccagggacactgaccagggtctgcatggtatgagctggccctgacccctgggcagaagtgggatctgacctccagactgcagggtcaggtcaccccaggtcctgttcactgcaggtccccaggctgcccaactccatgcagtgcaagatgagcccagggagaggacaggagttatccagagaacagcaggtcgagattcaagagaactgtccaccaggaggatgggctgccttagaaggagccacctgtccccaaggtttcaaaggaagggctcagggaggtatctctgggggctttagagagaggatgccagcctgggaggtaggtggtccccagaatgccctgtgttcctccatcacagcactgggggtgctgcctccaggtcaactgtgtccctgtctgatgcccactgtcactgctgttactcaatattgtactggaggcattggccaatgaaattggggtacagatacgaatagagatataagacttagaaagagggagaataagctataccaattcacaaccaatatgtgattatatatctaggaaattccagacatagtgaaaaactaatcaatgcaagaatttaatagaaagatgtaaagttaacataaggaggttaataacttttatacacagaaacaatactcagatagaaggtgtaatataagacctcttttattatgacaatataaagataaaacacctgggcatacccttaacaagaaatttgtaaaacctatacgagaaaactcttaaaacactcctaaaggacacaaaattcatcttcaaaagatgaagagacacatttagtttcttttcgatcactttattatgaaaatgttcaagcacacaaacaaattgaaaaagttgtacagccaacacttacatactcatcatgtagattctgtaattgttaatattttgtagtatttgcttgattaaatattcttacatccatgaaaataaatccatcctattttttcatgtatgtcagagtgagttgcggatctcagtacccttaggccctaaataccccagcactaacgtcattaactagagtttaatatttgtttctatcttaggtgaaatttacataaagtaaaatgcacaaagttgtagtgtaccttttgatgagttttgacaaataagtgcatacacccatgcaaccccttccaagacacacacagttcctgttgccccagtgagttccttcccagccaatcctcatgcccagtcccacctccagaggcaaccatcgtgctgagttttcatcataaattaatgttgtctgtagaagaattccatataaatagaatcatacaatgtgtacgttttcctgtgggttaaattttcttttgctcagcaaaatgtttttgagaatgaagtattttgttgcctctatcagtagtttattactttttttttttttgagacagagtctcgctctgtcgcctaggctggagtgcagtggcatgatctctgctcactgcaagctccgcctcccgggttcatgccattctcctgcctcagcctcccaagtagctgggaccacaagcgcccgccaccacacctggataaatttttttttttaaatatttttagtagagatgggatttcaccttgttagccaggatggtctcaatctcctgacctcgtgatccacccgcctcggcctgccaaagtgctgggattacaggcatgagccaccgggcccggccttgtttattactttttatagcaacataatattcagcagtgtgaatataccacatctggcttattcatcctcctattgatgggtattttgttttaatatttcctcagttttggaccattattattatgaataaatctgcttttaaaaataactttgtgtatgttttggatgggcacagtagctcatgcctgtaatcccagcactttgggaggccaaggaggcactgatcccttaaggccaagagttcaagaccagcctgggagacatgatgaaatctcatctctacaaaataataataataaaacaaaataacatctttgtatgtgtcttgttatgatcacatgtttcattcattttgggtaaaatacctaggaatgaaattgctgggttatggagtaggtatatgtttacttgtataagaaagggacagacttttcccaaagtggttgcatcattttacattctcaacaacagtatatgagagttctggttgctccatatatcctcatcaacatttggggtcttgtctttctactttcaggaatttggttggtgggttgcaacatttgattgtgattttaatttgcatttccctgatgactgatgatgttgagtagtttttttctgtgcatattagctattcgtatatcttattttgtgaagtttctgtgaaaatcttttagtcattattgcattcagaacaaaggattaaaaaaatgcatcgcttgaacccccgaggcagagtttgcagtgagccaagatcgtgccactgcactccagcctgggcgacagagtgagactccatctcaaaaaacaaaaacaaacaaacaaacaaaaaaaagcatgtggaactttagcatgagttgacttcactttgggcatgctgtctttagcagtcacaaaaaaatgaataggcgggtgaactattgtagaatgtaagagatataataaccaaatataaggcataagtcttgattggattccagttttaaaaatacacatggatagccaggcgtggtggcacacacctatagtcccagctactctaaagactgaggcaggaagatcagttgagcctgggaggtggaggttgcagtaagctgagatcctgtcactgcactccagcctggatgacagaacaagattctgtctcaaaataaattaaataaataaatacagatggaaaaatcattttggagaccaaaggggaagactgaaaaaggactatatattagatagggttagggagttattgtttattttctcaggtgtgatcatgggattgtgggccagtcactctggggagaggcacgctaaagcactcaaggacatagtgtcactcaaggacacagtgccttgatgcctgcaatttactctgacacagttcagaaaaaaacgaggaaatatggcaaaatgttaaacttgaatataaggagaggatgcgggtattcttggtattattttttccgcttttctggatgtttgaaattttcataataaaaagttgaaaacaaaggatgatgtgtaagaaagtaacttggtggcatcagaggtcatggatggtggcattggtgcaaagacatcaaggatgggaagggtctagttatacaaagagtagatgaaagacaccccaggcacaggaacagcaagtgcaaaggccctgaggtaggaactagccagcatcacattgtcagccctgcgagtgaccttcctagaaagcagacccttcaggcccagtaaagctgcagatgactgcaccctgactggcttctttactccaacctcatgagactcaccaagtcacaatcacccagcttcataataaaaagctgaaaacaaacactcttcaattcctgccccacagaatttgagaggtaacaaatatctgttgctgttttaagccctgaagccctggggtaatttgctaggcaacaatggataactaatgcagcttctgtcacatcttctaggaaacttcttaacctgctctctcagtacaaaatcccctttctccatttggttccatgtaaacctctgttcatccttcaaaattcacctaaaggagtgtttcccaaaatagggttcaggtgtcagtggctgagggcatgtgagatgattctaaggggttacacacgacagttgttaaaaagcgttacaggctatgcttgtgattaagcgcctattagagaaaaataattgaaaatagcatattaatcacatgattggataaacattattgttttaagatgaggccaaagaaaaacagtgagttgctttaaggaaaatttttgagtaaatagcagtgcaagtgctattcagatcgtaaaagtggaacacgactaaaatttggaagcgcagtgaggaatagcaggaattcctctaggaaaccttccctgccgctccaggtgggccagtttgcccctcattcagacccctaaatacctaaatatctctccacttggcgctggtggaatgtgtcaggatcccatctctggctgatggaagtctgtgaggaggctgtgggctctgcatctgacctgagctccaagtctgcagggcaggccctggggaaggggagatggatggaaagtggggagtaaggacaagccaggagcccacacaaggtggaaggtttcgggacccacagaacctgcctctattcttgctgcctcatcttggtggtgcaggggacctgcaggagtgacctttgtcacagaggtcaacgcacacctggctcaggaggtggagaaactgaaggaggattggggtaaaggtggagcagtttcaggtcctgctgctgctccaggctgaccagccgagctagcagatgagcaacacctggacctgagccacggaagctcctgcctggatttccccagcatgaaatgcacaacggcggctgctttgggcaggtgtgtcccgctcccaccctaacaggaacctacagggaagagagttctgagaggtgtcgttcagcctagccacagtcattgtcaccacaccctcttatgggcctgagcacccttttctgtctgcccttcctgggaatgagaagtccctgagagcggggatgggtctcattcattttggggtcttagtatcattcagcatagggcttggcacagagcaggagctcagggagtgcacagtgaattaatgaatgattcttaaagagcccctacatttaagtaagaaatccatccattgaataagaaatccatccatcacaggttcttcctgtgtccacctgggtggggaaagatggactcatcagtggcctgaaagggatcaagttaagtcaccccaaaatgtaccacgttggtataaggattgttttgagctgaaggccattgagaatcaacagatgctggaagagcactgccctctccttatctacctagaagcagggcatatatttccttttgggaaggtgtttcctccccagaccattaagaaaagcaactcatcctggagatggcgagtccacactgagatgagtatgcatagaccgacctcactaacagaacctgcatctccatcagtgccccaggtatttccgggtcactgtcccatgatgtatcaccctttgaagaacaagcccctttcctttgttaaaatggtatataagccccacaagtctagccgtttcattttttcttttctgtgaactcccatgcatgtaataaaaattctctgccctttctgttgttaattggtcttttgttagtttaattcacaggcctccagatactgaacctaagtggatagaggaaaagcattccctccctgaaaggcagttttccagactaacaaacaaatgtcataagtatgtacatcttccagaaaacggagttgtctagttacatagtatgccctgggcaatggattaatacatgtaacttaggcaattcatctgaatttcagatttttgaaggctaagagctaccttcacaggaccaagtgatggtctctggagtctgggtgttttacagagctccattgatagaaataatctttgcaagaacattgtaggatgatgaataggatctgcttatatctcaagttgtctgggaagcggggacatttgctccttcttatcttgctgggatttctgtcaccagcagttggaagggactccagttttaagacaaaggtttacagtttctttggcaccaagagcaaaagaagcataaaactaggcagaaaggggtataatattatcatgttgagaaaaggaatatggaaaatgtaaccttttgcatctcctgagttaatgaatctatactctgagaagggcagaaatgagaaccacctccccatctctgcaataaattccctagaaggtttggattttagccaagaagtttctgctttcctggagaatgtctctcaattcaaactctaaaccccaaagccagaaaaggcaaacgttaccttgtctgggctttaatccaagttttcagtggctggaaacacggttacactcctggagacaaggtggccttggacacccaggaagagccctgctcccgggcacacctggccctggagccagaccacctgggtttgaaccccagctctgcaccttaccagcagagcttcctgtctggaaagtggagatgatcgtgatatcactgacctcagactgtggttgtctcaattaaattaacaatccatgttatgagtgtacaagtatcgggcacagagcattgactcaattaatactgatctgtaatgaatggggattcatgccaagtgctgatgatgtgcatgacattagtgctgactgctgtaagtactggaagccgtcatgataatgaacagtgactttcatcacagttcatggggtcctttgtgaaacatgagggggcattaagcagaaacagccagcccagccctctccaccaccctttgaggaggtgtatctatgcctggtttacagtgtggaaactgaggctcagagacggggactggattgtgcacggtcacccagtcatgaaggccaagaaatgatggatgggatgcaggctgtgtgctcagccccctccctgtggagcagctcaggggcgtggggcatccagtcgccctgaagatgctgctcttgtctgtctgcctctctctctttccaccacactaggtctctgtttctggctctgtctcctcttcactgtgtgtctgtggttcactttgtgtcttttcatctctgtgtctccctgtctgtctctgtctttgtctctctaccaatgggtaccttctgtctttccttccttcttttcttttcttttctcttctcttcctttcttccttccttcctttcttccttcctttcttccttccttccttcctttcttttctttccagagtctcactctatcacccaggctggagtgcagtgtcatgatcttggctcactgcaacctctgcctcctgggttcaagtgactctcctgcctcagcctcctgagtagctgggattacaggtgtgtgccaccacatccggctaatttttgtatttttagtagagacagggtttcaccatgttggccaggctagtgtcaaactcctaatctcaaatgatccgcccgtctcagcctcccaaagtgctgggattacaggtgtgagccaccactccagcctcttctttctgtttctgtgtatttatgagtgtccttcctcctgcacactgtctgtctctcactctgtatctctccagctctgtccgtctctttttctgggtctctttccctctgtgtctctctgtgcctccctctttgtctctgttctgattttgtgtggccccatcagcttgactatggtggtgtctccatgtccctcctcctcctctcagatgctcttttggttctgtgttttccttctgtctctgtgtccctgtgggggtctcaggaccaggacgagggtgaagtaagtgaggtgtctctgctgcaaaatctaaggagacacccaaatccagggttgcacaagtgaccccttaatttttagtcctaggccctttctctctcccctcactctctctcttttctggattacaacaccattgatttttaatcaagaatccacaagcctgggtcctctcttgtctcaccctagtcctgccctgcatctctctatggctcaccttctacttctccggctctggctcttgagttctccctctctccgtgcctctcctctccctccatctctctatgttagtgtctctgtccccttcactctctgtctctctctgtatctcccctctccacccccgtatttctctgactctgtctctctctgggtctttatcattttctctttctctctccatccctgccccaactctctctgtgtgtttcccagtctctctgttttcccctaagccaggggcttcatgttgtccatctgtattgaggtcttgggtggccagcagggttctctgcttagtgggggcttcccctcagtgctttccatatgctgtccagactgggggtgctgcagctagaaagggaagaaggtttccatatttcctgagactggagtcacatcctgtcaccaatgcactcacctgctgactaaccagtgtacttctgggaattgcaaatgcatgaaatggcacccattctagactagtcacggcagtgttggtgatggtcacagaccgggaacgaccctgacgtttatccatagagaactgggtcatgagccatgatccacatcatggatactggtcagctgtggcaaagaatgaggtatccttctgtctgtgcactggggaaggtttccaagatacaccgcacagtgagaaaaacaagaagcagaacagtgcacggtgtgctacctcttacattacaaaggaggaaatgtaaaattaatttacaaatggccaataagcacatgaaaacatgctcaacatcactaatcattaggaaaataaaaatcacaactacagtgagataccaccttacatccattacgatggttgttctcaaaaaaaaagaaaaacagaaaagaacaagtgttggcgaggagaaattggaacgcttgtgtagtgtttgtgggtatgtgatatggcgcaaccactgtggtcatttctcaaaaaattaatcatagacttaccacaagatgcagcaattcggcttctggtgtattccaaaaagaacggaaagcaggggccccagcagatatttgcacgtctttgttcatagcagcattattcacaatagctaaaagttggaaacaagcccagtgtccatccgtccgtgaatgaataaacaaaacgtggtctatatgtacaaatgaatggaattcagccataacaagaagggtggttctgatggtgcttcaacatgaatgagccttgagttctttctgctaagtgaaataatcagactcaaaaagacaaatttgcatgattccacttaacagaggtgcctaacgtcatgaaatgcatagacagaaaatgaaaaggtggttgtcagtggctggagggagggggaaagaggagttggtgtttaatgggcacagaattccagttggggaatatgaaaaagttctgggtggggatggacagtggtggtggttgaacaacaacctaaatgtacttcctgcccctggatatacacttaaaagtggttaaaatgggctgggcaaggtggctcacgtctagtcccagtactttgggaggttgtggcgggcggatcacgaggtcaggagatcgagaccatcctggctaacatgacaaaataccctctctatctctactaaaaatacaaaaaattagccgggcgtggtggcatgcacctgtagtcccagctactcaggaggttgaagcacaagaatcggttgaacctgggaggtgaaggttgcagtgagccaagatcgtgccattgcattccagcctgggtgacagaacaagaccccttctcaaaaaaaaaaaaaaagaaagaaagaaagaaaagaaaagaaaagaaaagaaaagaaaagaaaaaaagtggttaaaatggtgaattctatgttatatatattttaccataatttacaataattcctattgttttgcataaaacagctgtagaaagctttgcaggtcatgaacagcacagctggccactggggctggtgtggggctaggacctgggtgcacagggaacaggtatgagacacaggctcttcatgcctgcacacacatatggatacacaaggatgcaaatttctgagccatctaaatacaacacctattcaaaaaatcaaacagaaaaaggaaatgaatggagctgaaggatgagggcaggtggggcggctgctcgggaggactctggagaccacttcacccaacattcgaggcctctcttagcagctggagctcatccgggggacttaggagctctggaaagaggaacaggagagggccatggccggaggaggcctgaaaaagatcatctctgccacagagaagatgctggctcggatactggtgtcccccgtggaggcagggagacccagggagacaactgtattcattcaaggaggaatgggtggtggtgcaaacttgggtggaggccacagggtgcagaagacaggacacagcagagatagatgtaggacatggaagggacagaaaggagtgatcactggacgtaaaggggcaaggaaagtggaagcatgagaacatctgctgggcatccggctgagaggttgggtgtccagggtgcccttccctgagggagaacccaggacaggagcagattcagagaaaaccacccagctcactccagcaagaagcagaaaagggactggttaaaggacagggtaggaaggtcaccaagctccaagggccctcatgaagccagcttggaggccacagggcccagggcaaggaccaaaccacaggcacaggacagctccggtcaagatcttctggccactgcaggaggcagaaaccacaccctgcaccctgcactgctgaggctggccctggagtccagaagcttctacaccagaagcttctgtcccccatccccactcaaaaaattaaaaacaaaaagcaaatcggtgccatgcaccctctgcttcctggtgctgttcgggatcctgagtctttcacgggggcacctgatggggaaagcctggacccgtgtctgtgtccctcctgcaaggagtgctgggaaaatgaactttccagcttcctccttgggaagacagaacattccccatgtgtactggtggcatttaaaaactgcacggcagccagagaacatggaccgtgttccaccaggagagttcctggagggatgtcccggtgcagacgcccgtcccaaggtgggtatttgagctgaggaactgagaagccggtttctgcctagagttagagatccgacaggcatcagcacatggaagggagggaagctacgatgcatcgagggtgggagatcagatgaaccaggagaggcagggcccgggaggaaccccggggagcagccgcctttaaagcctgggggaagtagcttcagagaaggtgaggtaggttgggtgggggttgctggaaaaagataattaagaaacaaatttctgctcagcccagaaacccccgtcatatccgtagaagcaaaagaaacctgtcttatgactgagtaagcattaagccaaaatgtgatgcaatctgctaagagatgacaaagacagaaagaaatcccacctttgtatccagccaagcaggtgcaacccgttacacacgtggtctccagatagacggtgactagttcccagttgagaggactcaacggcaccatttgtcacacatagttcatcctaaattcacccagtaactgtgttgattctctgtgtggttaattggctttatccacaggaaaaacaaacctctcttatctatgacaggaggtagttttgcaactgggagtgagatgcccccagaactgaggttccttccttctcacagaaactgggagacaggggcgctttctgcccggatgcctgcctttcaaagagagggctcctatggccttgaggaggacagttctgggttgtgaggcaggcaagatgcttatgtatgctttagaaagctttacatacatcttcaagggacagagaaagaattttcaattacacctcttctaaaaaataaatgctctcaaagtccagcctgggcaacatagcaagatccaatctccacacacacaataataataatcaatttgctgggcacagtgggatgtgcgtgtagtcccagctactcaggaggctaaggaggaaggatcacctgagcccaggaggttaaggctgcagtaagcttggatggcaccactgcactccagcctgggtgacagagggagactctatcaatgaatgaatgaatgaatgaatgaatgaatgaagagaaaatgatctgagtgaaaagaggagagtctctttatctttttgcaacaggctaaacaaaatttttaaaaatgtatatttgcctcacagagattattccaggaaaagaagtggccctcagtgtcaaaggatgcaaaactaacctgtgagttcctggcaggtttagcaataaagcaggatgttgctgatctcagtacaagcaatgttagagaaaggggaagatggaagtggacatggacgagtgagtggcaggtgacaaatggaagcaaagaaacgtatccagaccactgaagatgcttgaccgagaaaaaagaggcggtggagggaatggaagcccaaggaagtcatttgttgcaataagaggcctcagagcacgtgtagggtgcggggcagagcccatgcagaggggctgtggaaggctggtagggtgcaggtggccccactctccatcaccctgaggagtatgtggtcagagttaaagctcagtctgtttctgggatcaggtaagaggtcagcgtccggagaagagaggtggatcttcagatcctgcagacctccaccgcgccctctgtccctcttgactgctttttctccatctccattgtctggctcacattcctgtcacgtcttcctttctccctgcccctcttttctcttttctcctctctttttcttaacccttgtacctttggaagtcccactaatagaatttaaacagcttttcaagttggttttttgttcccagaaattgactttagactctccatgaataatgtggaaatcaaacgagtataagctggttcatgtctctgcaattaaacaaataaaatcaacattccaatgctttcttcttccagagtagcccacatttgattttttttttcttaattactgtcacttgcgatagatttttaaatcttgtaacctggttacacaaataccatggggcaaaagccttacttcctgtgagaggaaaccaggcttgactagcctcatgctggctttgaagaagtaaaatcaggggttgatgaatttgcatagggtaaatatcaaaggtcaaaagtcaacaataggtggtagagggaataccccaaattataaaagaacaaactgtttaagccacaatagaattatcgtagaaataaaccacggtccttcccactaaaatattccacttagaattgtaaaatattttcctcaataactcctggaagagcctattaagaaattaacgaggctgggcgtggtggctcacacctctaattccagcacttttgaaggccgagatgggcagatcacttgaagttaggagtttgagaccagtctggccaatatggtgaaaccccatctctgctaaaaatacaaaaattacccaggcgtggtggcaggcgcctgtaatcccagctactcaggaggctgaggcaggagaatcacttgaacctgggaggcagaagttacagtgagccaagattgtgccattgcactccagcctgggggacaagagcgagacttcatctcaaaaaaaaaaagagtcaaacttgagccaggcatggtggctcacacctttaatctcagcactttgggaagctgatgaagtcaggagttcgagaccagcctgggcaacatgctaataccctgtctctaccaaaaatttaaaaattagatgggtatagtggctcatgcctgtaatcccagctatttgggaggctgaggcacaaggatggcttgaacccgggaggtggagcttgcatttagccaagactgtgccattccactccagtctggagtgaaaaaaaaatccatctcaaaaaaaatcacaaaaagaataaatatggggccttatgactgtatattactgggcttctgacctagactgaaagatcagggaagactttcctgaaaagaaagtgagctatgatgggcccactgtactccagcctgggcaacgtaatgaggctctgtctcaataaaaacatgcagaataaaaccacaataagaaaataagacaataaaaccactacagaactattagaatggctaagattaaaaagagtgaccacgccaagtgttggcaaggatgtggaggcactggaacgctcacgctgctggtgggaatgtaagatggtacaaccactatggaaagcaatctggcagcttctaaaaatttcagcatacaccatgccactcgtcaattccattccattcccacatgatttttatttaaaggaaagtcaagtggaatgatctttaaagcatttttgcctgacaaatagatgaaatgtgggtagcagcccaacactccctggtcagtcttcacagggcatatgtggccttatggcccccaggaaatatggctctttccacaagtgctatgtccactctcttcaccaatcctaagatgttagttccacagcactgctagcattgggctttgtctatttctttctttctttgtcttttttgacagggggtcttgctctatcatccaggctgaagtgcaatgatgcaattttggctcactgcaacctccacttcccaggctcaagagatcattccacctcagcctcccaagtacctgggactacaggtgcacaccaccatgcctggctacttttttatatttttggtagggacggggtttctctatgttgcccaggctggcctggaactcctgagctcatgcgatccgcccgcctcagcctcccagagtgttgggacagcaggcgtgagccactgctcctggagtgggctttatttatttctatttctatttccttttcctgtatggtgaagagattgaaaagcatgccttattttgcaggaagagatggaaggctagaaagaggaagtaaattgttcaggtaatagtgaaatgatagcaggtctagaatatcagcctctttactcaaagcccacaatttccaaatatcacaacttcctttctctttatacactttagggattttatttatttatttatttattattttttgccaaagtgaaactccaggtcaaaggactttgttggtctagtgtcaaattagcttccaaggtgttgatctaatccatggggccaccagcactcaaggatataggcgcacagcaatgtcagcctcatgttgtaatccttttattcatttttgctcctctggtcagtacacgaaggcctgtaaagatcctttcttttatttttgagatggagtctcactctgtcgcccaggctggagtgcaatggcacaatctcagctcactgcaacctccgccccctgggttcaagccattctcctgccccagccaagtagctgggattacaggcacatgccatcatgcccagctaatttttgtatttttagtagagacagggtttcaccatgttggccaggctggtctcgaactcctgacctcaggtgatccacccacctctgcctcccaaagtgctgggattacaggcatgagacaccacacccagccaggcctatgaaaatctttaagtgtaacttttcattaagtgccatagatccctcctctttataacataaagtcctgtaaactgcatgcaggtcagtttgccataggaataatttgtctttgctggaacatgctgggtgcttggcagatgaagagattggaagtgaaccactgagatgactgatgagcgtcctcagcaggctgtgttgcagggggaagagtgcaggttgtttataaggcctgggtcgtgcccctggccaccatttcctggctttgtgactccagctttacttctccttcccagggctcagttttcctctccttgaaggggatgagtggaaccagctctggacgctgagctgcctgggtgtaaaggcttcctgtaatgggcagaagagtggataggagggcagcaggggagctggaccaaaagcatcatgtgatttgccgtgatcacagaggattttctggaagtagcttgggcacaatgtgtgcaaggagacagaagggtctcgtggtggggaataggacattcacacagcctcctccatggcttacctcacacagcagttgttaattagccaagaatttgacaaacaggcattaaaggccttctgaatgtgacacacgacacccagctagaagaatattgccaaaaatcattaaaactactctaatcatagtctgagtcagacacatccaggtggtggaagactttacaaaaaaaaaagaagtgaaccattgctttcaatgacattaaagaaaatgaaaggcaggtggggagcactcctagattaaaggggagtccagagatgagatgtaaaccaaaaggtatctgagacaggtctccatcaacttagaagcttattttgccaaggttaaggacatagaaaaaaccatgcaatcatagaaacagtctgtggtctgtgcctttttccaaagataattttgaggacttcaatatttagggtggaaaagctggctggcggtgaaagaaggagggtgtggtcgcattactgaatccacatggtgtaagagaaagcaggaggtaggggaataatcaatcacgtattcatctcacgctcagtaaattggcaccttgagaaagataaggtgaatatggccgggcgtggtggctcacacctgtaatcccagcactttgaaaggctgaggtgggaggatctcatgagcccaggaacttgagaccagcatggacaacatggcaaaacccatctctacaaaaaaaaccacaaaaattagctgggcgcggtggtgggtgcctgtagtcccagctacacgggaggctgaggtgacagaatgacttgagcccgggagacagaggtcgcagtgagccaagatcgtgccactgcgccccagcttgggagacaaagtatgatactctctcaaaaaaaaataaataagtaaaaatttttttaaagaaagataagatgaacatagagtagctacctacggagatacttaaccttttctctgtagctgtctgcttaggaacaaaaggaaaggcagtttcttgcatgactcagcttccagttttttttttttccttctgtcacagtgaattggggtcctgagtttttgtttctctttcataaagacaacgcagtgcagttcatgcttgaccccggatgttctcctgatcagaaagcaaaaacgcaatgagagatgtcattgggacaacagaggaaaactggaaatgggcttcctattagacaacagtgcatctgtgtaaactacacgggtctgatcctggtctgtggttacgcaggacaaagtccttaagaataatctatataggctgggcgtggtggctcacacctgtaatcctagcactttgggaggccgaggcaggtggatcacctgaggtcaagagctcaggaccagcctggtcaacatggtgaaaccctgtctctactataaatacaaaaattagccggacgtggtggcaggcgcctgtaatcccagctactcgggaggctgggacaggagaattgcttgaacctggagggcggaggttgcagtgagcagagatcacgacacttcactccagcttgggtgagagagcaaaactgcatctaaaaaaaaagagagagagaggaaaaaaaagaatgatatatgctttttaaaaatttttttatttatttattttttgtgatggagcctggctctgtcacccaggctggagtgcagtggtgtgatctcggctcactgctgcaacctccaccaccagcttcaagtgattctcctgcctcagcctcccaagtagctgggattacagttgtgtgtcaccatgtccagctaatttttatatttttagtagagatggggtttcaccatgttggccaggctggtcttgaactcctgacttaaagtgatccttccaaagtgctgggattacaggtgtgagtcactgtgcccagcccccttaagaataatcttaagaaggttcttgctgaagcacttagtggtgagagttacaatgtctactccttgtttttaaaatttaagaatattttaaaagcatatgttgtgtgtgtataaacagatacaataaaatgtgaagagtgggtgaatccagtgaaggggatacttgtgttcactgtactatccttgcaacttttctgccggtttgaaatttttccgtctttttttttgagatggagtcttactctgttgcccaggctggagtgcagtggtgcgatctcggctcactgcaacctctgcctcttgggttcaagcgattctcctgtctcagtctccggagtagctgggactacaggtggctgccactacaccgggctaatttttgtattttttttttaagtagagatggggtttcaccgtgttgtccaggttggtttcaatctcctgacttcaatagatccacccgccttggcttcccaaagtgctaggatgactggtatgagtcaccgctcccagcctgaaatttttcaaaatgaaaacaccgcaggtcaggagtttgagaccagcctgaacaacatagtgaaaccctgtctctattgaaaatacaaaaattaaccagacatggtggtgtgcacctgtagtcccagttactcgggaggctgaggtgggagagttgcttgagtccaggagatggaggctgtagtgacctgcagtgagctacaactgcaccactgtactccagcataggtgagagcaagactctgtttctaaaaaaaaaaaaaaattactgggcatgtactgtatgccatgtaggtggtggagacatagcaggagatcagacaaacacttccctgtctgtgtggcaaatattaaacttgcaataaacttgcaaagacaaataaagataaaatttatagagatgtcaaaaataaacatataattgcaagtcacattcatttctctttctctgctattcctgctctcgccttccctcttctgcttctcctctctccgtcacagacacccacaacgtccctctgcagtcactgacagataccccaggttccttcctgtcttcctccccgccaccccagtgtgttacagctgatttgtacagccctggacaagcccatggttaaatagctagggatttcatcagcctggttggcaaactgtaggtagcttaaaatcagacatgctatgagtatttacaccagagaaataggccaacactacgaggcaggatttgtgggtattgtttttcagaaaacttggtttttcagcacaacactgctctcccatcggcttccagcaaataaatgttgcatttttcagatatatcctaattctttcatagatattcagtctctactccacctctggccaagcctttcctggtggtaggaaactggggacttgagtcctatgttgtactgtgagggtagagaatagaagagaaagcatgagagaaaagcatgaaaagaagaatcaaaagaaagcaatataagaaggaaagagaaagaacagagaagtgggaagacagtggagggtagaaactaggaccggaagacatggggacaagctgatgcccactgcacaacgtcctcacaggtagttgggccatttccccatctggggtacagaggtggccagggagcccatgagaaatgaggaaactgccttcccaaactactggagaaagagggtgggggtggtgatccacatagctgggctcaggaggaaagagggctgggagtctggaccgggggaacctcgggtcaagatgccacagtttctaactatggagggcctgggggcctggactcctgggtctgagggaggagggcctgggggtctggactcctgggtcggagggaggagggcctcggggcctggactcctgggtctgagagagggaggcctggggcctggactcctgggtctgagggaggaggggctggggggctggactcctgggtctgagggaggaggcactgggggcctggactcctgggtctgagggaggagggactgggggcctggactcctgggtctgagggcggaggggctgggggtctggactcctgggtctgaaggaggaggggctgaggggctgggggtcctggaccctccatctgagggaggaggggctggatgcctggacccgaaggtctgaggaagaaagggggtccctgataggccactgcggccattgagacttggggtggggcccaagcctccattttgcaaggccctcccctccccacccttttctgggctggctgcttaagggctggtataaaggacttgtttcctgctgaaaaagcagaaagagattaccagccacagacgggtcatgagcgcggtattactgctggccctcctggggttcatcctcccactgccaggtgagtgatgagcccagcctggaggagattccctggaggccgggcaagggaaccctgctgagatggatttgctcttgccactccaggagtgcaggcgctgctctgccagtttgggacagttcagcatgtgtggaaggtgtccgacctgccccggcaatggacccctaagaacaccagctgcgacagcggcttggggtgccaggacacgttgatgctcattgagagcggtgagaaggccctggcgtgcagagaccccgccctgtcccctcagtcccttgatccctgtgcagggacccgggagccacccctccgggggatcgactcctagggtcccggtgatcccctttccagcctctcagcctacgccgtgtagcagcgtctccctccaggaccctggaggcctgacctccatcctcgcttgcctccctctttcggtccaggaccccaagtgagcctggtgctctccaagggctgcacggaggccaaggaccaggagccccgcgtcactgagcaccggatgggccccggcctctccctgatctcctacaccttcgtgtgccgccaggaggacttctgcaacaacctcgttaactccctcccgctttgggccccacagcccccagcaggtgcctgcgggagggtcgggaggagagggaggggctgctagaaggggatccgctgagcacagaggggctgttacggagtccctcccaccctcgctcgctatcccgaccctcgctggctccatccctcccctgactgctccctgaccatcgccccgccccgctccctttccatccctccccactcactcccgatccctcccaccgacctgccacccgggaatccccgcacccctcctcttctaagagcaaacaggacggatttctgatatgaaatcaccattaactgggttatcctgcattctttttttattctgttgcgtttggttcaagaagttctcctgcagggtttttgctatttcctcttcctaagggagactgaactgtaactttccactttccttgtctggtgttataaagagtctagggagatattttgcgcttcttttattggaacagcttgtgaacacagaagtctcctgttcttggaggtttagtagcgcttgcaggtgaaggcactggctcgttccagggcaccccctcattcccttgaccaatgagtctgcttctgtgtctcccctcggaaggccagactttgttgaaaggttcagacttgaccatgtctgagtctacatttggcctcagcaggcccctcctccaccctgcccaccccccacccccacttgccacccaagacacccccccttttcttttctttttttttttttttttttttttttctgagaaagcgtctcgctgtgtcgaccaggctggagtgcagtggcgcaatctcggctcactgcaacctccgactcccgggttcaagcgattctcctgcgtcagcctcccacgtagcagggactagaggagcctgccaccacgcccggctaatttttgtatttttagtagagacagggtttcactatgttgcccaggctggtcttgaactcctgacctcgtgatccacctgcctcagcctcccaaagtgctgggattacaggtgtgagtcaccacacccagccaagaccactttctgtacccagccctgggtgcctctacccagacctcctgttcattctcccttcctcttttatggattacacttctttattttcccacatccagatcccatgatgggagctgcagaaggcccctttgggaaggctgagcaggttgactcttgaggccagcaaaagtggggtgcagagaaggtatctgatcaaatccagtgccctctcagtgccccctcactctgtctgtcactttcctagacccaggatccttgaggtgcccagtctgcttgtctatggaaggctgtctggaggggacaacagaagagatctgccccaaggggaccacacactgttatgatggcctcctcaggctcaggggaggtaagcctgggacatcggggtccctgtggggactgaactggaaggtctggggactgagatcttaggctttggggagtgaggtgagctgaggcacggcatgagacccagaggagggtgggcctggcttcctggagctatgcctgcctctgagggttgggtggtcctggaggcagcatcactgactctccctcgctccccctttctgcaggaggcatcttctccaatctgagagtccagggatgcatgccccagccagtttgcaacctgctcaatgggacacaggaaattgggcccgtgggtatgactgagaactgcgatatgaaaggtgagtcctgcccctaggctgtgccctggactgcagcctcggggcacgatgacacatggggcatccagagccatcacaccaaagccagcaggaggaaggtcaagggtgcagggtgggttgcttggcatgtggctttaggcaacagtgagtgctggggcccctgctggctctcaagctgctgagagtgactggttgcttcaatttctgtgtctccacacccctggccttgggtaaccctaggtctcccacttccctaggccaccgtagcctctctcccacccgtatcagcccccgccccgctcatggtgctggagtgccccagcagccttgcctgcacaggagagaacatcagagagaaaatcaaggggactttgggtgtgacagagaaagcaagagttaaaggaggacactgagagggtccccacttacccatttaggtgctgccatggaagagagtgccagggaatgtctccataagaagggctccaaagcaacaggaagccatggtggggaggtgggggtcttataggaatcccagcttccctcctagaagcaaagtcttccctgcccctgcctcagtttccttgtctgcccacatcacgctaacccttagagcttagaagagagagttgtgtgagctctgcacacattcctctgtgtatttggctgtttctccctagctaggctgggagcctgaggctaggggcttggtaccactggcaccagggtttccagccttgggtagctcaggagacggctcaggaagggtaccaggaggtgtttgctcaagtgaggacatgcagggctcacttgagcaaagctccctcatgagtcagaccctgtttctacctgaagggcctccaggactaggagggggaggtgctacagacacagatggtcacagcttgaggtgatcagggctgtggcaaacggggatgtggggcctggggcagctcagaggaggaaaatactgatgttgttggggtagagagtcaaggagggctttacagaggaggtggcctgtgaaccgtgtgttaaagatgacctacagcttattggtagaagaggaagaggacattggtggcagagggaacagtgtgtagcagctgcataggcctggaggtgggagtgagcctgctgttttcaagaagagtccctcactccacctgagaaggactcatcaagatgagggggtacagctgggattgggggtgattcgaagttttccaggtggacaaggtgggtgtggggtcgaagagggagctgctccaagccaaaggcacagcaggtgtgaggctgaggaggaaatgaactggcatgccttcagaatggatactggtgggggaggaagagttaagtggggaacctggtggtcgctcaagtacctgaaaacccaggctgaggggtggaccctctcctgaaggcaggggagccatggaagattgtggagcagggagggcagggtctgagccatttatctttccttttgactgatgctgctgttaaggatctggccctggtctctgggaccagatgacactgataacccagaaggtatttcagaaacaaatcagacgcaacacatgccacacacacagcccacaataagcacagcagacacgaatgcgtcacaccatgacacatacacaccacacatcacataccacacacacactcccccatacccctgacataccacctatggaacacaaatcacacacagagcacacaatatgcacaacacacacaaatgcatcacacgagtgcacaattactacgtgtacatgtagtgtgtatgccacatactacacgtcaggtaccacacacactctccctctcaacatatcagacatgcaatacataccacacacaacacacaatacacacaacacatctggcatgccacacacaccacatgcaagcaaaacacagatacacagaacacacaccacaccaaacacacaaaacaaacacataccacatatatcacacacagtatgtctacacatgcacgcaccacacaaacataccatgaacacaccacacaccccatacaaccacaccccccacatgtatactacgcactcacacacagcacacatacctgcacacatcacgcatgtgcacacactacacaaacgcaccacataaaacacagcgactatgcaccaatcagtgctgttcatagagattcatctgctttcaacactggagccagatcttgcaggctgttttgcctccctggtgaagtgcagttcagcagtttagcagacagtgagcatcacaagaccaggcatcagaaactgggggaacaacaagacgttggggaccaagtgcaggagagaagaggcttcagggtgatggaaccgcttataagaagccgcagcagtgggagggctgggtgcaaggatgcaggttactaaaaggggccatggcagcagccccttgtgaagaaccaaggggcccgggcagataaggccctggctgcccctagaggagctgggcagcggtcccagtgagagagcagggaagagcccacgtctgaatcagggacacgtgggtcccaggcccagctctgccgccgaaacagctttccagcctcagcttcacacgaggatcaaaagtctccatatctcatggagcctctttccctggatttggggaagaggaggggatggttgcagacatgggacggaagcagatgcaaagaccatgatgtgggtgagtgcctgccagaaacacctgtgcggagcagagtgatggagggagcagggaggcggccgcgtcttatcaggcctcccgggccattggaagggcttagaattttattctccagaatggggacctcctggagtcttcggagcagaggagtgacatgaactgacttaggtttacctagcctccctctgcctgctgggtggagaatggagcgagaggaacagtgacaggcgggtgcagggattgccccaggagtcaggtgggagtgaagcggggggcttggaggcagcagaggtggtgacgtggggttgggttttgaagattttctgcagctcaagccagtaggattacttgaggaacacaatgtgggagagaaagagcgtggtcaaggacaacaccaatgtgttcagctagactggcagaaacgagccgccacgggtgtaagtaggggagatgggagtggggagagaagggtgggagaagggagcaggagccatgattttgattttgtcatctgtgaagtatgcaaatgagcagccctccagggtggcatcggttctgcaggtcgcatgtgttggtggaagctgggggctcagtctaagagtccctgcatcatgggaccgatcccccctgctctgtgatggccgtgaggggaggccaggggctgtggtttcacactagagccttgagggcctcggggccaaggtagccgaggatggtcttcagtacctgtctccctcctgctcccaaccccgaccctgagggtccagagtccctgggttcccagcctacctctgccactcacaagctgtgtggcatgggcagctactgagcaatcctgcctctgtttcccttgttgcaaatgagggtgttgattgtgatcacaccacctactgctggggtgctgtggggaaatgaggcatcccagataagctgtgttccctggaaccttagatgggtggatctgtgggaagcaatgaggtcagccaggtgcagaggcagtgctcagcggcagtgctcagcccaccctggcccttcgcatcttgtttggaacatagggctttgcaactgaaaggtatgagaaaggtctcaggctgccttccttattattgaaatgaggaccttaaagctcagatggggaagcagagatgggatgaggataaggaagagcttccattgctctcacagctaaagcaaggaacggccgttcccccagggctgtgagaggacgtccctgcgggtgttcaagcagaaacagggaacaatgggggtgggatttcgactcccaagtcccttctgaatccttggttaagggaatctgtggccaggtcacctggagtgtgactcaagagtgtgatcaccttccctagcccaggacgtggagggacagacatggtgggttcctggcttacacacaccctgggattcctctccccagattttctgacctgtcatcgggggaccaccattatgacacacggaaacttggctcaagaacccactgattggaccacatcgaataccgagatgtgcgaggtggggcaggtgtgtcaggagacgctgctgctcctagatgtaggtacgtggactgaggtagaagacgaacacctgtcccaagtccctggcagctccctccaccccactggattctttcccctgaatttcctgctcagctcccttcacatctgcaattttcaatccgactcttcttctctctgcatcttgggttccccttatgaaaactgggggtgaagcagtgggaatgacagtgtctgcctttctggggaggggtgaccacgtatgcggtaatccctgcccagggtggagaaccgtgccaacaccgaggactctcagtggcttcatacattctggaaatgtttatccagcatttgttttaggtgccgcagatccaatcccatctgtattcctgcagctttatatgccttgagaaacaggaaacaaacaaacaaaaagcagcaaagtatggggaatggagatcccagctctgcagagaaatctggcaaggaaaaggagataggaaaagtgaggggaaggctgcaattttaagctcagtgctcaggggagactcatggagaaggtgacctttgagcgagaactgggaggaggcagagcttcgggcaggacccaggccccagcctccgtctttgccccacactaaacatgacccagcagttgtgatcagggcattcaccctctgcctggggggtattgtgaagggcagggagtccagctctggagcccctgctgccctgggagctgcccagtccccagcccagctttccctctcaccctcaggactcacatcaaccctggtggggacaaaaggctgcagcactgttggggctcaaaattcccagaagaccaccatccactcagcccctcctggggtgcttgtggcctcctatacccacttctgctcctcggacctgtgcaatagtgccagcagcagcagcgttctgctgaactccctccctcctcaaggtatgggatccagggccgtggagaaatgaggcccagacacacagagactctggcccaaggtggccagctgctctgagcacaaagtcatgtacccccaccttccctctgctccccagctgcccctgtcccaggagaccggcagtgtcctacctgtgtgcagccccttggaacctgttcaagtggctccccccgaatgacctgccccaggggcgccactcattgttatgatgggtacattcatctctcaggaggtgagtgctgcaagcagggccccaaggatgaaggcactggtggcctggactcctgggtctgagggaggaggggctgggggcctggactcctggtccgagggaggaggcgctgggggcctggactcctggtccgagggaggaggggctgggggcctggactcctggtctgagggaggaggcgctgggggcctgggctcctggtcccagggaggaggggctgggtgcctggactcctggtctgagggaggaggggctgggggccggggctcctgggtctgaggagctgaggctctggactcctgggtctgaggtaggagggactgggggcctggactcctgggtctgagggaggaggggctgggggcctggacccctgggtctgaggagctggagctgggggtctgggctcctcggtctgagggaggagggtctggggcctggactcctgggtttacaacttggctgggctgtactctgtgtcctttctgacttggtcttctccctctaggtgggctgtccaccaaaatgagcattcagggctgcgtggcccaaccttccagcttcttgttgaaccacaccagacaaatcgggatcttctctgcgcgtgagaagcgtgatgtgcagcctcctgcctctcagcatgagggaggtggggctgagggcctggagtctctcacttggggggtggggctggcactggccccagcgctgtggtggggagtggtttgcccttcctgctaactctattacccccacgattcttcaccgctgctgaccacccacactcaacctccctctgacctcataacctaatggccttggacaccagattctttcccattctgtccatgaatcatcttccccacacacaatcattcatatctactcacctaacagcaacactggggagagcctggagcatccggacttgccctatgggagaggggacgctggaggagtggctgcatgtatctgataatacagaccctgtcctttctcccagtgctgggatttctccatgtgagggggcagcaggacacccagggatctagcgtgggggaggagaggagcctaatgagaaaatgaccatctaaagcctgcccttcattggtctggttcacgtctccaaaccagcttggatggtagcagagacttcagggtgctccagccaaacgtatttgggcatcaccatgacctgggaggggaagatgcactgagacgtatgaggcttccagcctagcagccagggccctagcacaaacaggaggctcgccccatctgagcaactgcaggagaggttagtacagtcatgcattgcttaacgacagggacgtgtcgttagaaatgtgtcgttaggtgattttatgaccataggaacattgtagcgtgcacttacaccaacccagatggtacagcccaatacacacccaggatggacgctagagtcgactgctcctaggctacaagcctgcagtgcatgttatggtgtgaatactgcaggcaatcttaacaccacggcaagtatttgtgcatctacacacatctaaacatagaaaaggtacagcataaatacactattgtcatctcagcagaccaccgttctatacgcaattcgtcgctgacccaaacgttgctatgtagcatctgcgtatcgtgggataattgacatgagggcttgagagaactccagaaaaaaatgggttagcattttcccagagctgttatcattgggtctctcttaccaccatagcccaaaaagggtgaggagaagagccactgctggaatctgcagacagagagagagagagagagagagacatagacagaaagagacagagagagctggagagagagccggagacagaaagagagagatattcagagagggttgcctaacaagagctcccatctcaggctgaaaaacgcgtccagcccacaatgatactggggagggaagtggggaactaaaattccaaactgatgtcctcactctggtctccagttgaggttccccattgactgaaccccctagaggccacagaagcaggagactccactggtccagcccccatagatctgccattcacactacagaacagaggagaggagagggaagaggagaagagagcgaatctggagaaggaaacagaacacgtctagtaccgttcactcccttgcccctcggcatccaccctttccctttgtccaaatgaaaatcaaagtccaggacgggctcggtggctcacgcctataatgccagcactttgggaagccgaggtgggaggatcacttgagcccaggagtttgagaccagcctgggcaacatagtgaaaccgcttctctacaaaaaaatacaaaaaataagccgggtgtggtggtgtgcgccccctccctctactggtcccagctactcagaaggctgagtccaggaggtcaaggctgcagtgagccaagactgcaccactgcactccagcctgggcgacagagcaagaccctgtctcaagggggaaaaataaatcagagtcctccgtacagatgacacacaattccagtccttccctctgtcacagtaacagtgtgtgatggtgacagtgatgtcctcctcccattgtgctgggcaccagttcttcacccacaatgagagaaagatggggaggagatggcttccaatacagctgctgaggtcctgggggcggggctgctggtgcttagagctgctttcttccagtacattccacattgtcttcccacttccaaaacctcctttggatgttatttgttacctgcagtgtaacccaaatcttgattcttatggagagtgagtcttggatggccttgtctttagtgggtttctgtagttttccatggaacagggccctggccaaggaaatgttaccgccatgagttgcctgccttcgaaaatagcctccttgtcccagccacccgacctccctctgtaatcagatgccattcccccgactgcagagtgacgtctcctttgcctgctgttttggcagcacaaggggcacaggatggctggagggctgtcatggcttcctgcagatcagaactaggaagagattcctcatccacagcagcccagggccacggggacaaagagcaagcattctctcagtgggctggcaggtgcagtcacgggagggagccgcgcttattcttcctgtctttcctggatctttgcatctggccctggggcgcgtgacccgatagcctggttgctggtttataagatgtgtggcccctcctgtgggtggtggggtacggtctccctcccggtgccctgataagccacacatgagccattgcgccaatctgagaagcagctgtgtctgtatagaggggcacctgagacggtcagtgggttccatgggtgtgagttaattaccccccattctttgcgttaacacgtgtccccagtggaagcaaccctgcatgggttccagagccacaggaaaggcgctgttcacagaagcactgagcagggtccagggaaggccaactggaacccccagtgtgtgcgtatccgtgtgaggacaaagcccagtcccctccaggatgggacgtgtcctgtgtggccagcctatctgcagtggccgggtagtcctcctgtaaaatgacgccttccaggggcttagccccgggctctgcctacactgggcagggctggatacagtgtgcagccaggccagtgctgggagactcagtccacttgtggtaaggtatgtcgccgtcctccctatccatgtggccatctgcacctggaccccctgaacaagctctgagggacagagtctgcctgacaccatccaccaaacaccaagaacctcatccccacagcacaggttctgggcttaagggtggggacggcatagctcacactttgtgcccatccccagaggaacatccatgtgtcctccctgtcttaagtttactcttttattctcttcaagtccttgaccatgtggcccgctctgggttcatgcaatggacccaagtccatccctccttgcagaacccctgaggttctgcccatctgaaggatttcccttcatcactcctcaggaccacctgaagtgggcactaaggcagccgccgtccacttctgctgggcgccagctcaccgtgaggacccatccataagcctggtctgcactttcctcctctgtatgaggtcacagggcttcccaggagctcacagatgtggtagagggaggggcagaaggacaggtgccatgggagcctgagtcacttgctggcctcagacctgcttgagcctgaccccatgctcagctgtcccgtggatgctggaggctgctgtgcatgccccaggttatggtttggtagctcagagagcacccggccctgaacttgattgcacttggcccagggatgagccaagagctgctttccgaatggtcagagttacctgcaggaggaggcgcggaatttctctagaacctccagctctgcactgttaatcttttggagcttgtgaaaatctccataaaataatgcactagatttgaaacatagactctcttacattttttcgtttctaaatatactctaaatatactcatccaggagttatcgagaataatattttgcaattccaactggagtaatgtactgggaagtgctgtggttcatttctttctttctatttttttttttttttttgagatggagtctcgctctgttacccaggctggagtgcagtggcgtgatctttgctcactgcaacctccgcctcctagcttcaagcgattctcctgcgtcagcctcccgagtagctgggattacaggcacccgccaccacgaccggcaatttttttgtatttttagtagagatggggttttgtcatgttggccaggctggtctcaaactcctgacctcaggtgatctgcctgccttggcctcccaaagtgctgggattactggcgtgagcctgtgcttcatttcttttataattctattgtggtttaaatggcccgttgctttcctaatttgtgggtattccctgtatcacctattgtttactttctacctctctgatatttaccgtatatgaatttatcaatcctgattttacttcttcaaagccagtatgagtttagtcaagtctgatttccccgtacaggatgaaaggtttttgtgggcgtcaagcaagaacattgtaggatgctgaataggatctgtatacatctcaagttgtctaggaagcagggacatttgctccttcttatcttgctgggatttctgtcactagcagttggaagggactccagttttaagacaaaggtttacaatttctttagcaccaagaaaaaaagaagcataaaactggagagaaaagggtataatattatgttcagcaaggaatatggaaaatataatcttttgaatcttctgagttaattaatctgtactctgagatgggcagaaatgagaaccacgtccccatctctgcaataaattccctaggtttggattttagccaagaagtttctgctttcctggagaatgtctctgaatttaaacaccacacctcaaagccagaaaagggaaagtttactttgggctttgatccaagttttcagtggctggaaacacggttacactcctggagacaaggtggccttggacacccaggaagagccctgctcctgggcacacctggccctggagccagaccacctgggtttgaaccccagctccgcaccttaccagcagagcttcctctctggaaagtggagatgatcgtgatatcactgacctcagactgtggttgtctcaattaaattaacaatccatgttatgagtgtacaagtatcgggcacagagcatcgactcaattaatactgatctgtaatgaatggggattcatgccaagtgctgatgatgtgcatgacattagtgctgactgctgtaagtactggaagccgtcatgataatgaacagtgactctcatcacagttcatggggtcctttgtgaaacatgagggggcattaagcagaaacagccagcccagccctctccaccacccttgaggtggtgtatctatgcctggtttacagtgtggaaactgaggctcagagacggggactggattgtgcacggtcacccagtcacgaaggccaggaaatgatggatgggatgcaggctgtgcgctcagccacctccccgtggagcagttcaggggcactgggcatcgggtcgccctgaagatgctgctcttgtctgtctgcctctctctttccaccgcactgggtctctgtttctggctctgtctcctcctcactgtgtgtctttggctcactttgtgtcttttcatctctgtgtctccctgtctctctctgtctttgtctccctctcacttggtcccttccttcctttcttccttccttccttccttccttctttctttctttctttctttcctttttctttcttattataacaccattgatttttaatcaaggatccacaagcttgggtcctctcttgtctcaccctagtcctgccctgtgtctctctacggcacaccttttacttctctggctctgactctctgagttctccctctgtccatgcctctcccctccctccatctctctgtgttagtgtctctgtaccctttcctctctgcctctctctgtatctcccctctccacccccatatatctctgactctgtctctctctgggtctttatcattttctctttctctctccatccctgcccccattctctctctgcctttctcgatctctctgtttctcaccctccttctgccttcccctaagccagggacttcatggctctgatggctgtccagcggtgttgcccatttttattgaagtatccttctgtcgacccacttggaaagacttccaagatacactgcacagtgagaaaaacaagaagcagaacagtgcacagtgtgccacctctggcattacaaaggaggaaatgtaaaatgaatttataaatggccaataagcaaataaaatttggtcaacatcacttatcattaggaaaatggaaatcaaaaccacagtgagataccaccttacatctgttctgatggcagttctgaaaaaaaaaaaaaaaaaaaaaacaaagtgttggcgaggagaaattggaatgcttgtgcagtgtttgtgggtatataatatggcacaaccactgtggtcatttctcaaaaaattaatcatagacttaccacacgatgcagcaattctacttctggtgtattctgaaaagaactgagagcaggggccccagcaggtatctgcatgtctttgttcatagcagcattattcacactagccaaaggtgtaaacaagccaaatgatatggctttcctctgtccgaacacaaatctcacgttcagctgtaattcccaaaggtcgaaaatagcctccttgtcccagccacctgacctccctctgtaatgagatgccgttcccccgactgcaagtgactcaggctcccatggcacctgtcctcctgcccctccctctaccacatctgtgagctcctgggaagccctgtgacctcatacagaggaggaaagtgcagaccaggcttatggatgggtcctcacggtgagctggcgcccagcagaagtggacggcggctgccttagtgcccacttcaggtggtcctgaggagtgatgaagggaaatccttcagatgggcagaacctcaggggttctgcaaggagggatggacttgggtccattgcatgaacccagagcgggccacatggtcaaggacttgaagagaataaaagagtaaacttaagacagggaggacacatggatgttcctctggggatgggcacaaagtgtgagctatgccgtccccacccttaagcccagaacctgtgctgtggggatgaggttcttggtgtttggtggatggtgtcaggcagactctgtccctcagagcttgttcagggggtccaggtgcagatggccacatggatagggaggacggcgacgtaccttaccacaagtggactgagtctcccagcactggcctggctgcacactgtacccagccctgcccagtgtaggcagagcccggggctaagcccctggaaggcgtcattttacaggaggactacccggccactgcagataggctggccacacaggacacgtcccatcctggaggggactgggctttgtcctcacacggatacgcacacactgggggttccagttggccttccctggaccctgctcagtgcttctgtgaacagcgcctttcctgtggctctggaacccatgcagggttgcttccactggggacacgtgttaacgcaaagaatggggggtaattaactcacacccatggaacccactgaccgtctcaggtgcccctctatacagacacagctgcttctcagattggcgcaatggctcatgtgtggcttatcagggcaccgggagggagaccgtaccccaccacccacaggaggggccacacatcttataaaccagcaaccaggctatcgggtcacgcgccccagggccagatgcaaagatccaggaaagacaggaagaataagcgcggctccctcccgtgactgcacctgccagcccactgagagaatgcttgctctttgtccccgtggccctgggctgctgtggatgaggaatctcttcctagttctgatctgcaggaagccatgacagccctccagccatcctgtgccccttgtgctgccaaaacagcaggcaaaggagacgtcactctgcagtcgggggaatggcatctgattacagagggaggtcgggtggctgggacaaggaggctattttcgaaggcaggcaactcatggcggtaacatttccttggccagggccctgttccatggaaaactatagaaacccactaaagacaaggccatccaagactcactctccataagaatcaagatttgggttacactgcaggtaacaaataacatccaaaggaggttttggaggtgggaggacaatgtggaatgtactggaagaaagcagctctgagcaccagcagccccgcccccaggacctcagcagctgtattggaagccatctcttccccatcttcctctcattgtgggcgaagaactggtgcacagcacaatgggaggaggacatcactgtcaccatcacacactgttactgtgacagagggaaggactggaattgtgtgtcgtctgtacggaggactctgattattttttcccccttgagacagggtctcgctctgtcccccaggctggagtgcagtggtgcagtcttggctcactgcagccttgaccttctggactcagccttctcagtagctgggaccacaggcgtgcaccaccacacccggctaattttttgttgtcttagtggagactggatttcacggtattagccaggatggtctcaatctcctgacctcatgatctgcccgcctcggcctcccaaagtactgggactacagacaggcacgcaccaccacacccggctaattttttgtattttttgtagagaagcagtttcactatgttgcccaggctggtctcaaactcctgggctcgagtgatcctcccacctcagcttcccaaagtgctggcattacaggcgtgagccaccgagcctgtcctggactctgattttcatctggacaaagggaaagggtggatgccgaggggcaagggagtgaacggtgctagacgtgttctgtttccttctccagattcactctcttctcctcttccctttcctctcctctgttctctactgtgaatggcagatctatgggggctggaccagtggagtctcctgcttctgtggcctctagggggttcagtcaatggggaacctcaactggagaccagagtgaggacatcagtttggaattttagttccccacttccctccccagtatcattgcgggctggacgcgtttttcagcctgagatgggagctcttgttaggcaaccctctctgaatatctctctctttctgtctccggctctctctccagctctctctgtctctttctgtctatgtctctctctctctctctctctctgtctgcagattccagcagtggctcttctcctcaccctttttgggctatggtggtaagagatacccaatggtaacagctctgggaaaatgctaacccatttttttctggagttctctttagcccttatgtcaattatcccacaataggcagatgctacatagcaacgtttgggtcagtgacgaattgcgtatagaacggtggtctcctgagatgacaatagtgtatttatgctgtaccttttctatgtttagatgtgtatagatgcacaaatacttgccgtggtgttacgatgcctgcagtattcacaccataacatgcactgcaggcttgtagcctaggagcagtcaactctaccatccatcctgggtgtgtattgggctgtaccatctgggttggtgtaagtgcactctacaatgttcctttcgtgataaaatcacctaacgacacatttctaacgacacgtccctgtcgtaaagcaatgcatgactatactaacctctcctgcagtcgctcagatggggccagccccctgtttgtgctagggccctggctgctaggctggaagcctcatacatctcagtgcatcttcccctcccaggtcatggtgatgcccaaatacgtttggctggagcaccctgaagtctctgctaccatccaagctggtttggagacatgaaccagaccaatgaagggcaggctttggatggccattttctcattaggttcctctcctccaccatgctagatccctgggcgtcctgctgtccccttacatggagaaatcccagcactgggagaaagcacagggtctttattatcagacacatgcagccactcctccagtgtcccctctcccacagggcaagtccggctgctccaggctctccccagtgttgctattaggtgagtagatatgaatgattatgtgtggggaagatgattcatggacaggatggggaaataatctggtgtccaaggccattaggttacaagcacaagggacggttgagtgtggtggtgagcagcggtgaagaatcgtgggggaaatggagttagcaggaagggcaaaccgctccccaccacagcgctggggccagtgccagccccaccccccaagtgagacactccaggcccccagccccacctccctcatgctgagaggcaggaggcggctcatcacccttctcacacacagagaagatcccaatttgtctggtgtggttcaacaaggagctggaaggttgggccacacagccctgaatgctcattctggtggtcagcccacctagagggagaagaccaagtcagaaaggacacagagtacagcccagccaaattcataaacccaggagtccaggccccagaccctcctccctcaaacgcaggagctcagacccccagcccctcctacctcagacccaggagtccaggcccccagccccttctccctcagtcccaggagcccaggacaccagcgccttcatccttggggccctgcttgcagcactcacctcctgagagatgaatgtacccatcataacaatgagtggcgcccctggggcaggtcattcggggggagccacttgaacaggttccaaggggctgcacacaggtaggacactgccggtctcctgggacaggggcagctggggagcagagggaaggtgggggtacatgactttgtgctcagagcagctgcccaccttgggccagagtctctgtgtgtctgggcctcatttctccacggccctggatcccataccttgaggagggagggagttcagcagaacgctgctgctgctggcactattgcacaggtccgaggagcagaagtgggtataggaggccacaagcaccccaggaggggctgagtggatggtggtcttctgggaattttgagccccaacagcgctgcagctttaggtcgccaccagggttgatgtgagtcctgagggtgagagggaaagctgggctggggactgggcagctcccagggcagcaggggctccagagctggactccctgcccttcacaataccccccaggcagagggtgaatgccctgatcacaactgctgggtcatgtttagtgtggggcaaagacggaggctggggcctgggtcctgcccgaagctctgcctcctcccagttctcgctcaaacgtcaccttctccatgagtctcccctgagcactgagcttaaaattgcagccttcccctcacttttcctatctccttttccttgccagatttctctccagagctgggatctccattccccatactttgctgctttttgtttgtttgtttcctgtttctcaaggcatataaagctgcaggaatacagatgggattggatctgcggcacctaaaacaaatgctggataaacatttccagaatgtatgaagccactgagagtcctcggtgttggcacggttctccaccctgggcagggattaccgcatacgtggtcacccctccccagaaaggcagacactgtcattcccactgcttcacccccagttttcataaggggaacccaagatgcagagagaagaagagtcggattgaaaattgcagatgtgaagggagctgagcaggaaattcaggggaaagaatccagtggggtggagggagctgccagggacttgggacaggtgttcgtcttctacctcagtccacgtacctacatctatgagcagcagcatctcctgacacacctgccccacctcgcacgtctcggtattagatgtggcccaatcagtgggttctttactcaagttttcctgcttcttcaaggtggtcccccgatgacaggtcagaacatctggggagaggaaacccagggtctgtgtaagccaggaacccaccatgtctgtccctccacgtcctgggctagggaaggtgatcatgctcttgagtcacactccaggtgacctggccacggagtccctcaaccacggattcagaagggacttgggagtccaaaccccacccccattgttccctgtttctgcttgaacacccgcagggacgtcctctcacagccctgtgagaacagccattccttgcttcagctgtgagagcaatggaagctcttcctgagcctctgcccatctctgcttccccatctgagctttaaggtcctcatttcaataataaggaaggcagcctgagacctttctcatacctttcagttgcaaagccctatgttccaaacaagatgcgaagggccagggtgggctgagcactgccgctgagcactgcctctgcacctggctgacctcattgcttcccacagatccacccatctaaggttccagggaacacagcttatctgggatgcctcatttccccacagcaccccagcagtaggtggtgtgatcacaatcaacaccctcatttgcaacaagggaaacagaggcaggattgctcagtagctgcccatgccacacagcttgtgagtggcagaggtaggctgggaacccagggactctggaccctcagggtcggggttgggagcaggagggagacaggtactgaagaccatcctcggctaccttggccccgaggccctcaaggctctagtgtgaaaccacagcccctggcctcccctcacggccatcacagagcaggggggatcggtcccatgatgcagggactcttagactgagcccccagcttccaccaacacatgcgacctgcagaaccgatgccaccctggagggctgctcatttgcatacttcacagatgacaaaatcaaaatcatggctcctgctcccttctcccacccttctctccccactcccatctcccctacttacacccgtggcggctcgtttctgccagtctagctgaacacattggtgttgtccttgaccacgctctttctctcccacattgtgttcctcaagtaatcctactggcttgagctgcagaaaatcttcaaaacccaaccccacgtcaccacctctgctgcctccaagccccccgcttcactcccacctgactcctggggcaatccctgcacccgcctgtcactgttcctctcgctccattctccacccagcaggcagagggaggctaggtaaacctaagtcagttcatgtcactcctctgctccgaagactccaggaggtccccattctggagaataaaattctaagcccttccaatggcccgggaggcctgataagacgcggccgcctccctgctccctccatcactctgctccgcacaggtgtttctggcaggcactcacccacatcatggtctttgcatctgcttccgtcccatgtctgcaaccatcccctcctcttccccaaatccagggaaagaggctccatgagatatggagacttttgatcctcgtgtgaagctgaggctggaaagctgtttcggcggcagagctgggcctgggacccacgtgtccctgattcagacgtgggctcttccctgctctctcactgggaccgctgcccagctcctctaggggcagccagggccttatctgcccgggccccttggttcttcacaaggggctgctgccatggccccttttagtaacctgcatccttgcacccagccctcccactgctgcggcttcttataagcggttccatcaccctgaagcctcttctctcctgcacttggtccccaacgtcttgttgttcccccagtttctgatgcctggtcttgtgatgctcactgtctgctaaactgctgaactgcacttcaccagggaggcaaaacagcctgcaagatctggctccagtgttgaaagcagaagatgaatctctatgaacagcactgattggtgcatagtcgctgtgttttatgtggtgcgtttgtgtagtgtgtgcacatgcgtgatgtgtgcaggtatgtgtgctgtgtgtgagtgcgtagtatacatgtggggggtgtggttgtatggggtgtgtggtgtgttcatggtatgtttgtgtggtgcgtgcatgtgtagacatactgtgtgtgatatatgtggtatgtgtttgttttgtgtgtttggtgtggtgtgtgttctgtgtatctgtgttttgcttgcatgtggtgtgtgtggcatgccagatgtgttgtgtgtattgtgtgttgtgtgtggtatgtattgcatgtctgatatgttgagagggagagtgtgtgtggtacctgacgtgtagtatgtggcatacacactacatgtacacgtagtaattgtgcactcgtgtgatgcatttgtgtgtgttgtgcatattgtgtgctctgtgtgtgatttgtgttccataggtggtatgtcaggggtatgggggagtgtgtgtgtggtatgtgatgtgtggtgtgtatgtgtcatggtgtgacgcattcgtgtctgctgtgcttattgtgggctgtgtgtgtggcatgtgttgcgtctgatttgtttctgaaataccttctgggttatcagtgtcatctggtcccagagaccagggccagatccttaacagcagcatcagtcaaaaggaaagataaatggctcagaccctgccctccctgctccacaatcttccatggctcccctgccttcaggagagggtccacccctcagcctgggttttcaggtacttgagcgaccaccaggttccccacttaactcttcctcccccaccagtatccattctgaaggcatgccagttcatttcctcctcagcctcacacctgctgtgcctttggcttggagcagctccctcttcgaccccacacccaccttgtccacctggaaaacttcgaatcacccccaatcccagctgtaccccctcatcttgatgagtccttctcaggtggagtgagggactcttcttgaaaacagcaggctcactcccacctccaggcctatgcagctgctacacactgttccctctgccaccaatgtcctcttcctcttctaccaataagctgtaggtcatctttaacacacggttcacaggccacctcctctgtaaagccctccttgactctctaccccaacaacatcagtattttcctcctctgagctgccccaggccccacatccccgtttgccacagccctgatcacctcaagctgtgaccatctgtgtctgtagcacctccccctcctagtcctggaggcccttcaggtagaaacagggtctgactcatgagggagctttgctcaagtgagccctgcatgtcctcacttgagcaaacacctcctggtacccttcctgagccgtctcctgagctacccaaggctggaaaccctggtgccagtggtaccaagcccctagcctcaggctcccagcctagctagggagaaacagccaaatacacagaggaatgtgtgcagagctcacacaactctctcttctaagctctaagggttagcgtgatgtgggcagacaaggaaactgaggcaggggcagggaagactttgcttctaggagggaagctgggattcctataagacccccacctccccaccatggcttcctgttgctttggagcccttcttatggagacattccctggcactctcttccatggcagcacctaaatgggtaagtggggaccctctcagtgtcctcctttaactcttgctttctctgtcacacccaaagtccccttgattttctctctgatgttctctcctgtgcaggcaaggctgctggggcactccagcaccatgagcggggcgggggctgatacgggtgggagagaggctacggtggcctagggaagtgggagacctagggttacccaaggccaggggtgtggagacacagaaattgaagcaaccagtcactctcagcagcttgagagccagcaggggccccagcactcactgttgcctaaagccacatgccaagcaacccaccctgcacccttgaccttcctcctgctggctttggtgtgatggctctggatgccccatgtgtcatcgtgccccgaggctgcagtccagggcacagcctaggggcaggactcacctttcatatcgcagttctcagtcatacccacgggcccaatttcctgtgtcccattgagcaggttgcaaactggctggggcatgcatccctggactctcagattggagaagatgcctcctgcagaaagggggagcgagggagagtcagtgatgctgcctccaggaccacccaaccctcagaggcaggcatagctccaggaagccaggcccaccatcctctgggtctcatgccgtgcctcagctcaccctcactccccaaagactaagatctcagtccccagaccttccagttcagtccccgcagggaccccgatgtcccaggcttacctcccctgagcctgaggaggccatcataacagtgtgtggtccccttggggcagatctcttctgttgtcccctccagacagccttccatagacaagcagactgggcacctcaaggatcctgggtctagggaagtgacagacagagtgagggggcactgagacggcactggatttgatcagataccttctctgcaccccacttttgctggcctcaggagtcaacctgctcagccttcccaaaggggccttctgcagctcccatcatgggatctggatgtgggaaaataagtgtaacccatgaaagaggaaggcagagagatcaggaggtctgggtagaggcacccagggctgggtacagaaagtggtcttggctgggtgtggtggctcacacctgtaatcccagcactttgggaggctgaggcagatggatcacgaggtcaggaattcaagaccagcctggccaacatagtgaaactctgtctctactaaaaatacaaaaattagccgggcgtggtggtgggctcctccagttccagctacttgggacgctgaggcaggagaatcgcttgaacctgggagtcggaggttgcagtgagccgagattgcgccactgcactctagcctggtcaacacagcgagacgctttctcagaaaaaaaaaagggaggggtcttggggggcaagtgggggtggggggtgggcagggtggaggaggggcctgctgaggccaaatgtagactcagacatggtcaagtctgaacctttcaacaaagtctggccttccgaggggagacacagaagcagactcattggtcaagggaatgagggggtgccctggaacgagccagtgccttcacctgcaagtgctactaagcctccaagaacaggagacttctgtgttcacaagctgttccaataaaagaagcgcaaaatatctccctagactctttataacaccagacaaggaaagtggaaagttacagttcagtctcccttaggaagaggaaacagcaaaaaccctgcaggagaacttcttgaaccaaacgcaacagaatagaaaaggaatgcaggataacccagttaatggtaatttcatatcagaaatccgtcctgtttgctcttagaagaggaggggtgcggggattcccgggtggccgaggtcggtgggagggatcgggagtgagtggggagggatggaaaggaaggggggcggggcggctgccagggagcagtcaggggagggatggagcgagcgaggggcacgatagcgagcgagggtgggagggagctgaagaggtaaagagggtgctgtccctgtggcaagggtctcccattgttcaagggcaattctctagagaaggggcacctgtgagatgttttcagccaacaccagctggccaaggggatgtgggtaggatatgccttatccactccagagctggagacacactggattccaggggccagttcctaaccactacaccatgcctggatgcatgtgtgtcacttaatttcataacgtgaacagagtaaaaacaatgataaacacaactgttattactgatgccacagagcgccccagttaacagctccaaggcattcacctgcagcactgccggtactgggttttctgtttttttttcttctcttttctttgctgttaggtgcaacaatcgcagaaattccttcctcatcttggtcttgtagaagaggatgcaggagctgagagaggggaatgagcttgaccaagatctctgagtcaagctgtggtcaagctagaatcaagtctgggcccctcagccccctgcttgcggggagagaggggttgggagggacaagaacctctgatcccatgtgtcctcaaagcagtccaagggctctctgtttctttttgttccttttgtttctccttcttgagcagccaacgtgttccctaagtttgagaagcccagagagtgccagaatttgcttccaatgtttacctaccaaggacaaagccagattctggagcacctgggtggggctttttccatggagataaagactcccctgttgagtacaaatatttcctccatgaagatactcttgaaaacacactctccccactgagacttctcttcatgatatccgaaatgagtatttcccctgggggtttccccagctctgatccttacctctgtctctgtcctactaatcacctgggctgtgactgtctccgtctgtctctcaatctcaaattcctgaacaggacctcacacagggtctggtccacacaggagggtcagggagggtcaaggacctcctatcctacctaacttcaaagcattccaccagctatttctttttattccctaaatttttttttaagacagagtcttgttctgtcacccaggctggagtgcagtggcatgatctcagctcactgcaacctctgcctgctgggttcaagagattcccctgcctcaccctcctgagtagctgggattacaggcatgcgccaccatgcccagctaatttttgtattttcaatagagacagggtttcatcatgttgttcaggctggtctcaaactcctgacctgcggtgttttcattttgaaaactttcaggctgggcacggtgactcacgccagtaatcctagcactttgggaggtcaaggcgggtggatctattgaagtcaggagtttgaaaccaacctggacaacatggtgaaaccccatctctacttaaaaaaaaaaaatacaaaaattagcccggtgtagtggcagccacctgtagtcccagctactccggaggctgagacaggagaatcgcttgaacccaagaggcagaggttgcagtgagccgagattgcgccattgcactccagcctggatgacagagtaagactccgtctcaaaaaaaaagaaagaaaaatttcaaacctgcagaaaagctgcaaggatagtacagtaaacacaagtatccccttcactggattcacccactcttcacattttactgtatttgtttatacgcacacgacacatgcttttaaaatattcttaaattttaaaaacaaggagtagacattgtaactctcaccactaagtgcttcggcaaaaaccttcttaagattattcttaagggggctgggcacagtgactcacacctgtaatcccagcactttggaaggatcactttaagtcaggaattcaagaccagcctgaccaacatggtgaaaccccgtctctactaaaatataaaaattatctggacatgatgacacacaactgtaatcccagctacttgggaggctgaggcaggagaatcacttgaagctggtggtggaggttgcagcagtgagcctagatcacaccactgcactccaacctgggtgacagagccaggctccatcacaaaaaataaataaataaaatttttctaaaagtatagattattctttttttctctttccctcttttttttaggtgcagttttgctctctcacccaagctggagtgaagtgtcgtgatctctgctcactgcaacctccgccccctgggttcaagcaattctcctgtcccagcctcctgagtagctgggattacaggcgcctgccaccacgtccggctaatttttgtatttatagtagagacagggtttcaccatgttgaccaggctggtcctgagctcttgacctcaggtgatccacctgcctcggcctcccaaagtgctaggattacagatgtgagccaccacgcccagcctatatagattattcttaaggactttgtcctacgtaaccacagaccaggatcagacccgtgtagtttacacagatgcactgctgtctaataggaagcccatttccagttttcctctgttgtcccaatgacatctctcattgcgtttttgctttctgatcaggagaacatccggggtcaagcatgaactgcactgtgttgtctttatgaaagagaaacaaaaactcaggaccccaattcactgtgacagaaggaaaaaaaaaaactggaagctgagtcatgcaagaaactgcctttccttttgttcctaagcagacagctacagagaaacggctaagtatttccttaggtagctactccatgttcaccttatcttttttaaaaaaattttttaattattattttttttgagacagtgtcatactttgtctcccaggctggggtgcagtggcacaatcttcgctcactgcgacctctgtctcccgggctcaagtcattctgtcacctcagcctcccgagtagctgggactacaggcacccaccaccacacccagctaatttttgtgtttttgtagagatgggttttgccatgttgtccatgctggtctcaaattcctgggctgatgagatcctcccacctcagcctttcaaagtgctgggattacaggtgtgagccaccacgcccggccatattcaccttatctttctcaaggtgccaatttacccagcgtgagatgaatacgtgattgattattcccctacctcctgctttctcttacaccatgtggattcagtaatgcgaccacaccctccttctttcaccgccagccagcttttccaccctaaatattgaagccctcaaaattatctttggaaaaaggcacagaccacagactgtttctatgattgcatggtttttttctatgtccttaaccttggcaaaataagcttctaagttgatggagacctgtctcagataccttttggtttacatctcatctctggactcccctttaatctaggagtgctccccaactgcctttcattttctttaatgtcattgaaagcaatggttcactttttttttttttttgtaaagtcttccaccacctggatgtgcctgactcagactatgattagagtagttttaatgatttttggcaatattcttctagctgggtgtggtgtgtcacattcagaaggcctttaatgcctgtttgtcaaattcttggctaattaacaactgctgtgtgaggtaagccatggaggaggccgtgtgaatgtcctattccccaccacgagatccttctgtctccttgcacacattgtgcccaagctacttccagaaaatcctctgtgatcacggcaaatcacataatgtttttggtccagctcccctgctgccctcctatccactcttctgcccattacaggaagcctttacacccaggcagctcagcgtccagagctggttccactcatccccttcaaggagaggaaaactgagccctgggaaggagaagtaaagctggagtcacaaagccaggaaatggtggccaggggcacgacccaggccttataaacaacctgcactcttccccctgcaacacagcctgctgaggacgctcatcagtcatctcagtggttcacttccaatctcctcatctgccaagcacccagcatgttccagcaaagacaaattattcctatggcaaactgacctgcatgcagtttacaggactttatgttataaagaggagggatctatggcacttaatgaaaagttacacttaaagattttcataggcctggctgggtgtggtgtctcatgcctgtaatcccagcactttgggaggcagaggcgggtggatcacctgaggtcaggagtttgagaccagcctggccaacatggtgaaaccctgtctctactaaaaatacaaaacttagccgggcatgatggcatgtgcctgtaatcccagctactcggctggggcaggagaatggcttgaacccggggggcggaggttgcagtgagctgagattgtgccattgcactccagcctgggcgacagagtgagactccatctcaaaaataaaagaaaggatctttacaggccttcgtgtactgaccagaggagcaaaaatgaataaaaggattacaacatgaggctggcattgctgtgcacctatatccttgagtgctggtggccccatggattagatcaacaccttgaaagctaatttgacactagaccaacaaagtcctttgacctggagttccactttggcaaaaaataataataaataaataaataaaatccctaaagtgtataaagagaaaggaagttgtgatatttggaaattctgggctttgagtaaagagagtgatattctagacctgctatcatttcactattacctgaacaatttacttcctctttctagccttccatctcttcctgcaaaataaggcatggttttcaatcacttcaccacacaggaaaaggaaatagaaatagaaataaataaagtccactccaggagcagtggctcacgcctgccatcccaacactctgggaggccgaggcgggtggatcgctcgagctcaggagttccaggccagcctgggcaacatagagaaaccctgtccctaccaaaaatacaaaaaagtagccaggcatggtggtgtgcacctgtagtcccaggtacttgggaggctgaggtggaatgatctcttgagcctgggaagtggaatttgcagtgagccaaaattgcatcactgcacttcagcctggatgacagagcaagaccccctctcaaaaaagacaaagaaagaaagaaatagacaaagcccaatgctggcagtgctgtggaactaacatcttaggattggtgaagagagtggacatagcacttgtggaaagagccatatttcctgggggccataaggccacatatgccctgtgaagactgaccagggagtgttgggctgctacccacatttcatctatttgtcaggcaaaaatgctttaaagatcattccacttgattttcctttaaataaaaatcatgtgggaatggaatggaattgccgagtggcatggtgggtgtatgctgaaatttttagaagctgccagactgctttccatagtggttgtaccatcttacattcccaccagcagcgtgagcattccagtgcctccacatccttgccaacacttggcgtggtcactctttttaatcttagccattctaatagttctgtagtggtatcttattatggttttattctgcatgtttttcttgagacagagcctcattatgttgcccaggctggagtacagtgggcccatcatagctcactttctcttcaggaaagtcttccctgatctttcagtctaggtcagaagcccagtaatatacagtcatgaggccccatatttattctttttgtgctttttttgagacggatttttttttttttgcactccagactggagtgcaatggcacaatcttggctcactgcaagctccatcttccaggttcacgccatccttgtgcctcagcctcccaaatagctgggattacaggcatgagccaccatacccagctaatttttaaatttttggtagagacagggtattagcatgttgcccaggctggtctcgaactcttgacttcatcggtttcccaaagtgctgagattacaggcgtgagccacgatgcctggctcaaggttgactcttttttcttttttttttttttttgagatgaagtctcgctcttgtcccccatgctggagtgcaatggcacaatctcggctcactgcaacttctgcctcccaggttcaagtgattctcctgcctcagcctcccgagtagctgggattacaggcgactgccaccacgcctgggcaatttttgtattttttagtagagacggggtttcaccatattggccaggctggtctcaaactcctaaactcaagtgatctgcctgtctcggccttccaaagtgctggaattagaggtgtgagccaccacgcccggcctctttaatttcttaataggctcttccaggagttattgagaagaatattttacaattctaagtggaatattttagcaggaaggaccgtggtttatttctacgataattctgttgtggcttaaacagtttgttcttttgtaatttggggtattccctctaccacctattgttgactttcgacctttgatatttaccctatgtaaattcatcaacccctgattttacttcttcaaagccagcatgaggctagtcaagcctggtttcctctcacaggaagtcagtctttggccccatggtatttgtgtaaccaggttacaagatttaaaaatctatcgcaagtgacagtaattaaaaaaaaaaaaaaacaaatgtgggctactctggaagaagaaacattggaatgtagattttatttgtttaattgcagagacatgaaccagcttatactcgtttgatttccacattattcatggagagtctaaagtcaatttctgggaacaaaaaaccaacttgaaaagctgtttaaattctattagtgggacttccaaaggtacaagggttaagaaaaagagaggagaaaagagaaaagaggggtagggagaaaggaagacgtgacaggaatgtgagccagacaatggagatggagaaaaagcagtcaagagggacagagggcgcggtggaggtctgcaggatctgaagatccacctctcttctctggacactgacctcttacctgatcccagaaacagactgagctttaactctgaccacatactcctcagggtgatggagagtggggccacctgcaccctaccagccttccacagcccctctgcatgggctctgccccgcaccctacacgtgctctgaggcctcttattgcaacaaatgacttcctccggattccattccctccaccgcctctttcttctcgctcaagcatcttcaatggtctggatacgtttctttgcttccatttgtcgccttccactcactcatccatgtccacttccatcttcccctttctctaacattgcttgtactgagatcagcaacatcctgctttattgctaaacctgccaggaactcacaggttagttttgcatcctttgacgctgagggccacttcttttcctggaataatctctgtgaggcaaatatacatttttaaaaattttgtttagcctgttgcaaaaagatagagactctcctcttttcactcagatcattttctcttcattcattcattcattcattcattcattcattgatagagtctccctctgtcacccaggctggagtgcagtggtgccatccaagcttactgcagccttaacctcctgggctcaggtgatcctccctccttagcctcctgagtagctgggactacacgcatataccccactatgcccagcaaattgattattgttattgtgtgtgtggagataggatcttgctatgttgcctaggctggactttgagagcatttattttttagaagaggtgtaattgaaaattctttctctgtcccttgaagatgtatgtaaagctttctaaagcatacataagcatcttgcctgcctcacaacccagaactgtcctcctcaaggccataggagccctctctttgaaaggcaggcatccgggcagaaagcgcccctgtctcccagtttctgtgagaaggaaggaacctcagttctgggggcatctcactcccagttgcaaaactacctcctgtcatagataagagaggtttgtttttcctgtggataaagccaattaaccacacagagaatcaacacagttactgggtgaatttaggatgaactatgtgtgacaaatggtgccgttgagtcctctcaactgggaacgagtcaccgtgtatctggagaccatgtgtgtaacgggttgcacctgcttggctggatacaaaggtgggatttctttctgtctttgtcatctcttagcagattgtatcacattttggcttaatgcttactcagtcataagacaagtttcttttacttctatggatgtgaggggggtttctgggctgagcagaaatttgtttcttaatcatatttttccagcaacccccacccaacctaccccaccttctctgaagctacttcccccaggctttaaaggcggctgctccccggggttcctcccgggccctgcctctcctggttcatctgatctcccaccctcgaggcatcgtagcttccctcccttccatgtgctgatgcctctcggatctctaactctaggcagaaaccggcttctcagttcctcagctcaaatacccaccttgggacgggcatctgcaccaggacttcccgccgggaactctccaggtggaacacggtacatattctctggctgcagtgcagtttttaaatgccaccagtacacatggggaatgttctgtcttcccaaggaggaagccggaaagttcattttcccagcactctttgcaggagggacacagacacgggtccaggctttccccatcaggtgctcccgtgaaagactcaggatcccgaacagcaccaggaagcagagggtgcatggcaccgatttgctttttgtttttgttttaattttttgagtggggatcggggacagaagcttctggactccagggccagcctcagcagtgcagggtgcagggtgtggtttctgcctcctgcagtagccagaagatcttgaccggagctgtcctgtgcctgtggtttggtccttgccctgggccctgtggcctccaagctggcttcatgagggcccttggagcttggtgaccttcctaccctgtcctttaaccagtcccttttctgcttcttgctggagtgagctgggcggttttctctgaatctgttcctgtgctgggttctcccttagggaagggcaccctgggcacccgacccctcagccggatgcctagcagatgttctcatgcttccacttccttgcccctttatgtccagtggtcactcctttatgtcccttccatgtcctacatctctctctgctgtgtcctgtcttctgcaccctgtggcctccacctaagtttgcaccaccacccattcctccttgaatgaatacagttgtctccccgggtctccctgtctccactggggccagcagcatccgagccagcttcttctctgtggcagagatgatctttttcaggcctcctccggccatggccctctcctgcttctgtttccagagctcccaagtccctgggatgtgctccagctgctaagagaggcctcgaaggttgggtgatgtggcctccactgtcctcctgagcaaccaccccacctaccctcatccttcagctccattacatttcctttttctgtttaattttttgaataggtgttgtatttagatggctcagaaatttgcatccgtgtgtatctgtgtatgtgtgcaggcatgaagagcctgtgtctcatccctgttccctatgcacccaggtcctagccccacgccagacccagtagccagctgtgctgttcatgacctgcaaagctttctacagctgttttatgcaaaacaataggaattattgtaaattatggtaaaatatatataacatagaattcaccattttaatgacttttttcttttcttctcttttcttttctttttttttctttttttttttttttttttttttttgagaagagttctcactctctcacccatgctggaatgcaatggcgtgatctcggctcactgcaaccttcacctcccgggttcaaccgattctcctgcctcagcctcctgagtagctgagactacaggtgcatgccaccacgcccggctaattttttgtagttttagcagagaggggatttcatcatgttagccaggattgtctcgatctcctgacctcgtgatctgcctgcctcgacctcccaaagtgctgggattagacgtaagccacctcgcccggcccattttaaccacttttaagtgtacatccagtggcaggagtacatttaggttgttgttcaacgaccaccactgtccatccccacccagaactttttcatattccccaactggaattctttaccaattaaacacaactcctctttccgcctccctccagccactgacaaccaccttttcattttctgtctatgcatttcacgacgttaggcacctctgttaagtggaatcatgcaaatttgtctttttgagtctgattatttcacttagcagaaagagctcaaggctcattcatgttgaagcaccatcagaaccacccttcttgttatggctgaatcccattcatttgtacatatagaccacgttttgcttattcattcacggatggatggacactgggcttgtttccaacttctagctattgtgaataatgctgctatgaacaaagacatgcaaatatctgctggggcccctgctttccgttcttttcggaatataccagaagccgaattgctgcatcttttggtgagtctatgattaattttttgagaaacgaccacagtggttgtgccatattacatacccacaaatgctacacaagcgttccaattcctccttgccaacacttgttcttttctgtttttcttttttttttttttttttttttttgagaacaaccatcgtaatggatgtaaggtggtatctcactgtagttgtgatttttattttcctaatgattagtgatgttgagcatcttttcatgtgcttattggccatttgtaaattaattttacatttcctcctttgtaatgtaagaggtagcacatggtgcattgttctgcttcttgtttttctcactatacggtgtatcttggaaaccttcccgggtgcacagacagaaggatacctcattctttgccacagctgcccagtatccatgatgtggatcatggctcatgacccagttctctatggataaacatcagggtcgttcccggtctgtggccatcgccaacactgccgtgactagtctagaatgggtgccatttcatgcatttgcaattcccagaagtacactggttagtcagcaggtgagtgcattggtgagaggatgtgactgcagtctcaggaaatatggaaaccttcttccctttctagctgcagcacccccagtctggacagcatatggaaagcactgaggggaagccccactaagcacagaaccctgctggccacccaagacctcaatacagatggacaacatgaagcccctggcttaggggaaaacagagagactgagaaacacacagagagagttggggcagggatggagagagagagaaaatgataaagacccagagagagacagagtcagagaaatacaggggtggagaggggagatacagagagagacagagagcaaaggggacagagacattaacacagagagaaggagggagaggagaggcatggagagagggagaactcaaagagccagagccagagaagtagaaggtgagccatagagagattcagggcaggactagggtgagacaagagaggacccaggcttgtggattcttgattaaaaatcaatggtgttataatccagaaaagagagagtgaggggagagagaaagggcctaggactaaaaattaaggggtcacttgcgcaaccccggatttgggtgtctccttagattttgcagcagagacacctcacttacctcaccctcatccttgtcctgagacccccacagggacacagagacacaaggaaaacacatagaaccaaaagagcacccaagaggaggaggagggacatggagacaccacgatagtcaagctgatggggccacacaaaatcagaacagagacaaagagggaggcacagagagacacagagggaaagagacccagaaaaagagatggacagagctggagagatacagagtgagagacagacagtgtgcaggaggaaggacactcataaatacacagaaacagaaagaagaggctggagtggtggctcacacctgtaatcccagcattttgggaggctgagacgggtggatcatttgagattaggagtttgagaccagcctggccaacatggtgaaaccctgtctctactaaaaatacaaaaattagccggatgtggtggcacacacctgtaatcccagttactcaggaggctgaggcaggagagtcacttgaacccaggaggcagaggttgcagtgagccaagattgtgccactgcactccagcctgggtgacagagtgagactctggaaagaaaagaaagaaagaagggaaggaaggaaggaaggaaggaaggaaggaaagaaagaaggaaagacagaaggtacccattggtagagagacaaagacagagacagacagggagacacagagatgaaaagacacaaagtgagccacagacacacagtgaggaggagacagagccagaaacagagacccagtgtgatggaaagagagagaggcagacagacaagagcagcatcttcagggcgacccaatgcccagtgcccctgagctgctccacggggagggggctgagcgcacagcctgcatcccatccatcgtttcctggccttcgtgactgggtgtccatgcacaatccagtccctgtctctgaacctcagtttccacactgtaaaccaggcatagatacaccacctcaagggtggtggagagggctgggctggctgtttctgcttaatgcaccctcatgtttcataaaggaccccatgaactgtgatgagagtcactgttcattatcatgatggcttccagtacttacagcagtcagcactaatatcatgcacatcatcagcacttggcatgaatccccattcattacagatcagcattaattgagttgatgctctgtgcccgatacttgtacactcataacatggattgttaatttaattgagacaaccacagtctgaggtcagtgatatcacgatcatctccactttccagagaggaagctctgctggtaaggtgcggagcaggggttcaaacccaggtggtctggctccagggccaggtgtgcccaggagcagggctcttcctgggtgtccaaggccaccttgtctccaggagtgtaaccgtgtttccagccactgaaaacttggattaaagcccaaagtaaactttcccttttctggctttgaggtgtggtgtttaaattcagagacattctccaggaaagcagaaacttcttggctaaaatccaaacctagggaatttattgcagagatggggacgtggttctcatttctgcccatctcagagtacagattaattaactcagaagattcaaaagattatattttccatattccttgctgaacataatattatacccttttctctccagttttatgcttctttttttcttggtgctaaagaaattgtaaacctttgtcttaaaactggagtcccttccaactgctggtgacagaaatcccagcaagataagaaggagcaaatgtccccgcttcccagacaacttgagatgtaagcagatcctattcagcatcctacaatgttcttgcaaagattatttctgtcagtggagctctgtaaaacacccagactccagagaccatcacttggtcctgtgaaggtaccctcttagccttcaaatatctgaaattcagatgaattgcctgacttacttttttttttttttttgcaacagagtctcactctgtcgcccaggctggagtacaatggcgtaatcttggctcactgcaacctctgcctcccaggttcaagcgattctcctgcctcggcctctggagtagctgggactacaagcacgtgccaccacacccagccaattttttgtatttttagtagagacggggtttcaccgtgttagccaggatggtctggatctcttgacctcgtgatccgcctgcctcgacctcccaaagtgctgggattacaggcgtgagccactgcacccggccttacttacatttattaattcaatgcccaggacataatgtgtaaatggacaactctgttgtctagaatttatgcaaatacttgtgatgtttgtttgtttatctggaaaatggcttttcagggaggaaaagcttttcctctacccacttaggttcagtatctggggtcttgtgaattttactaacaaaagatcaattttaaaaaggcacacaattttcattaatatttacatgcatgggagttcacagaaaagaagtgaaactcaaagaaatggttagacttgtggggcttgtataccattttaacaaaggaaaggggtttgttcttcaagggaaggtccatcatggggaagtgacctagaaatgcctgggaaactgatggagatgcagggtcttttagtgaggtctgtctatgcacactcatctcagtctccaggatgagctgcctttctttatcatctgggtagaaaacaccttcagaaaaggaaatttatgctctctgcttttaggtagataaggggagggcagacctcttcccgtatctgttgattctcaaaggccttaagctcaaaataatccttatacaaatgtggcgaattttggggtgacttaacttgatccctttcaggccactgatgagtccatctttccccacccaggtggaggtaagaaaaacctgtgatgtggctgcatggatttcttatttaaatttagagtgtcactaacaaccatttatcaattcattgggcactccctgagcccctgctctgtgccaagccctatgctgaatgatactgagaccccaaaatgaatgagacccatccatgctctcaaggacctcccattcccaggaacggcacagacaggacagggtgctcagacccataagagggtgtggtgactctgaactcaggtaggctgaacgacgcctctcagaactcccttccctgtaggttcctgttaggttgggagcaggacacacctgcccaaagcagctgccgttgtgcatttcatgctggggaaatccaggcaggagcctccgtggctcaggtccaggtgttgctcatctgctagctcagctggtcagcctggagcagcagcaggacctgaaactgctccacctttacgccaatcctccttcagcttctccacctcctgagccaggtgtgcattgagctctgtgacaaagttcactcctgcaggtcccctgcaccaccaagatgaggcagcaagaacagaggtaggttctgtgggtcccgaaaccttccaccttgtgtaaactcccggcctgcccttactccccactttccatccatctccccttccccagggcctgccctgcagacttggagctcaggtcagatgcagagcccacagcctcacaggcttccatcagccagaaatgggatcctgacagattccaccagcaccaagtggagagatatttaggtatttaggggtctgagtgaggggcaaactggcctgcctggggcggcagggaaggtttcctagaggaattcctgctattcctcattgcgcttccaaattttagtcgtgttccacttttacgatctgaatagcccttgcactattatttactcaaaaattttccttaaaacaactcactgtttttctgtagcctcatcttaaaacaataatgtttatctaatcatgggattaatatgatatttccaattcttttactctaataggcgcttaatcacaagcatagcctgtaacgctttttaacaactgtcatgtgtaaccccttagaatcatctcacatgccttccaccactgacacctgaaccctattttgggaaccactcctttaggtgcatcctgaaggaggaacagaggtttacatggaaccaaatggaggaagggagttttgtgctgagagagcaggttaaggagtttcctagaagatgtgacagaagctgcattagttatccattgttgtctagcaaattaccgcacggcttcggggcttaaaacagcaacagatatttgttacctctcaaattctgtggggcaggaattgaagagtgttttcagcattttttttttttttttttttttttttttgagacggagtctcgctctgtcgcccaggctggagtgcagtggcatgatctccactcactgcacgttccgccttccgggttcagggcattctcctgcctcagcctcctgagtagctgggactacaggcacccgccaccacacccggctaattgtttgtatttttagtagagacggggtttcaccatgttagccaggatggtctcagtctcctgacctcgtgatccacccatctcagcctcccaaagtgctgggattacaggcatgagccaccgcacccagcctgttttcagctttttattatgaagctgggtgattgtgacttggtgagtctcatgaggttggagtgaagacgctagccaggtgcagtcatctgcagctttactgggcctgaagggtctgctttctagaaaggtcactcacatggctgacaatgtggtgctggctagttcctacctcagggcctttgcacttgctgtcctgtgcctggggtgtctttcatctactctttgtataactggacccatcccatccttgatgtctttgcaccaatgccaccatccatgacctctgatgccaccaagttactttcttacacatcatcctttgttttcaactttttaatatgaaagatttcaaacatccagaaaaattgaaaacataataccaagaatacccacatcctctccttatattcaagtttaacattttgccatatttcctctggtttttttctgaaccatgtcagggtaaattgcagacatcaagacactgtgtccttgagtactttagcatgcctctccccagaatgactagcccacaataccgtgatcacgcctgagaaaatcaacaataactccctaacagtatctaatacatagtccattttcaatcttcaccattgttctgcaaaatatcttttccatgtatatatatttttatatatttatattatataaatataaatatataaaaatatatattttatataaatatataatatatataaatatataatatataaaaatatatattatatataaatatataatatataaaaatatatattatatataaatatataatatataaaaatatatattatatataaatatataatatataaaaatatatattatatataaatatataatatataaaaatatatattatatataaatatataatatataaaaatatatattatatataaatatataatatataaaaatatatattatatataaatatataatatataaaaatatatattatatataaatatataatatataaaaatatatattatatataaatatataatatataaaaatatatattatatataaatatataatatataaatatgtataacatataatatataaaatatataatatatataatatatataaaaatatatatttatatatacttttttttgagacagagtctcgctctgttgccaggctggagtgcagtggcgccatcttcgctcactgcaacctccacctcctggattcaagtgattctcctacctcagcatcctgagtagctgagactacaggcatgcaccaccacgcccagctaatttttgtatttttagtagagacagggtttcaccatgttggccaggatggtctcgatctctcgacctcatgatctacctaaatgctgggattataggcgtgagccatcatgcccagccccatgtatatttttaaacggggatacaatcaagactaatgctttgtatttggttattaagtatctttcattctacaacagtccccctccactacccatttttttcatgactgctaaagaaaagacagaaggcccaaagtggagtcaacttatgctaaagttgcacatcatcaaactgaaacctgcgttgtttactagtaagatacgtccttccagaaatcatgagagagattatagccaaatcccattaagccaacaagattttgctaaaatccctataaagggaagtaactttgagatgacagattggctattttttccttgttcctgctttctttggcttttttctgcccataaaactcaccaaatccctttagctcaatagcgctccattctgttttatagattgaatgccgcctagttcatgaattgctaataaaagccaattcgatattttactctatttgctgaaattttgttctttgacatgacatagactgtgaggagagcagacatgttgtcttatagaatgcccacattctgaatttgtttccttatggtgtcatttcactgacttcactctaagccctctattctctataaatctcaaagtgaatcccaaagcttgagtaaattctggttgcattttttttaggcaagaatacttcatgagtgatgctatctacattatattggattatatcaagttgcaatagttatatagctattattcctgtgtgatatttcagtgacttaaagattgatccatgggttcaggtgttgtcagcctgattcgtgtgttgtcaagttgcccatcaactttttgcttgatggttttagaatgatctaggcaatgatgatgatcattgcctagatcagtcatttcattaagcattccaaaatggcaattatctaatttttaaattcctcctgcatttttaaaagctagacttatttttctctaatgaagaaaacttcctcactcgtgatttggttaccttgaagtgttgtctgtttaggaagttactgtgatacttgattattttccttcatatactagctttgtgagctagttccctagcaacctccaaagtaaactgatgacattttaaaagtattattatgaaatatagatttttgtatattttaagtgtttcaatccattgcatccacactttcttttgatgctcgaaatgtcccacctttgtttgaaacagcccctccaagttggctcctatgtcctatttttttttttttttttttttaaagacgaagtttcactcttgtcagccaggctggagtgctggagtgcaatggtatgatctcaggtcacacaacctccacctcccaggttcaagcaattctcctgcctcagcctcctgagtagctgggattacaggtacaagccaccatacccagcaaatttttgcatttttagtaaagacagggtttcaccatgttggccaggctggtctcgaactcctgacctcaggtgatctacccgcctcagcctcccaaagtgctgggattacaggcgtgagccaccaagcccggcctcctatgtcctcttgacatgacccttgtagtatatgataatttcctgctttggcatggaaaatatcccaggctcatcttacataattcttacttcatatctgaaatcaggcatgtctccaaggagtcttggagaagattcatttttgtggggagtggtatttttagagactacaatttaaatactaagggtgctgtttgctactgttagcagatacagctagaaaaagacatactttttagaaaaagaaatgcttttcctgagttcacactagtatttcccatgcaaatgaaagattcttgggttttcgtttaaatgcattggtttcatatttgtatctcttttctctggccctgatgcataattacttatttgctatttgtttcaaaatagtcatgcagctgtttgcactaagaataacagtactgaatgcagtttagatttctttcatttatttcaatcagcaagatctatctcactagagttgtccagtcattgtacacaggtaaagtagctggaaataattttcctctgtgttactatgccaccagctttccacccagattcatttccaccagtttagttttcacttttagagatggcttagctcttgtgttttaaattttattttgtttttaataaggtaaaatatttacctggttacacaatcaaactattaagcaaaaggcttaatggtttatgttccatctcaggcccctttttttccctccctcctcctataggtgaatcagtttggttttgttgtttattcttccactgcttctttcaaaaagcataggcaaatatgtttttttaaatattttaaaagtttatttgtcttttaactagcccacagacccaattctttgagggctgagctgatttctgacacatgttctataggccctcctcttggaaacttactttctatccccttccaaaaaagtctgcaccttccatcatgatgcacattttaagttaaaattgccaatccaagcctcaaaatgcaagtttattgaataaagctgagaagagcagtaaacagacaaaaaaatgcatccacctaaataaaaaaattcacatatttacataattcagtaactgttaaaagttttcacacacagaggttaatgcacaggaaaatgctggtaatagcatctaggtgtcttgaaacgctgaaagcaatgtatagacacacaaacacattaaggtttaggtataggtcaattaacaaacctatacagtcctcacagagtcacacactctagttccaattcctccttttaggcacaagcaagttgtcacattctttgtaatggttcactttgaccattaatggtattgaacaacagcagcaagtttaaataccctttcatttacagaaccatccatcccatcagggaaatatgcaacatgcttcaaagaataagaagagaactttgggccaggtgcgtggctgagggccgggagtggtggcttgcgcctataatcccagaattttgggaggccaaggcaggcagatctgaggttgggagttcgagaccaacctgaccaacatggagaaactctgtctctactaaaaatacaaaatcagccgggtgtggtagcaaatgcctgtaatcccagctactcaggaggctgaggcaggagaatagcttgaacccgggaggcggtaagctggagattgtgccattgcactccagcctgggcaacaacagcaaaactctgtctcaaaaaaaaaaaagagaaaacttaaaagcccagattctactcataaaaatacgaatggagaaaagcaagtagtgtctgtgcaacacagtgcagtatattgtacagaatatttttaaggccacggcagtctatgaattaaaactggtattcattaaaagaacttactgtagactaaactctgagtgctcaacacgtttggaaatgcagtctacataagtgctgcttaacaaaagaaaaaatcacacgcagtgtgaggcaacacataagcgggtgtcccatagtgtttaagctactacagtggtctatatgaataataatttacaactgaaccagtatgaatatgtccctttatgtatacagaagtcactaaactacaaaacatgttcatttgaagtttttagacatctctgtatcatagaagcaaacgaacagcatcagttcctcagttctctgtgtgattgattattaacctgtagatgttgaacatgattacattagattaagcaggcaggtctagagttgtcacaataatcaagatgtctaatggcaccagtcaaaagagtgccaaaccttacatcaataaaagagaaaaataaaattttgtatttgtttataagtatcttttgtgctgaaagtcaactttatggctggatgtaaaaagtcgggaattacagtgtcatgcagcagcactggtttaatgactggagatagaacaaacagatgtttgaactaaatctgacttttttttttttttgagatggagtctcactctgtcgcccaggctggactacagtggcacaatctcggttcactgcaagctccgcctcctgggttcacgccattctcctgcctcagcctcctgagtagctgggactacaggcgcccgccaccacagccggctaatttttttgtattttttagtagagacggggtttcaccgtgttagccaggatggtctcgatctcctgacctcgtgatccgcctgccttggcctcccaaagtgctgggattacaggtatgagccaccgcgtccagcctaaatctgacattcttaacagtttttattatattgggtggaatgctctaaattcatgaaagcttttgagaaaatcttcaattcttaaccccttaaaaaagtatgctgaaccagaaagaaaaaacaaaagatagaaataatgatctggacagatgcaaaacagcatgcgttagttcctcccatatcccaactgccatctggcgataaagagttctcagaaagcagaatgtctttaatatccctcaggtaggatctcaccagtgtaaagaatcaacattgatctggtgcctccactcactctctgtggaccgtattggattcctaagatgtaattatacatttcacatgcatttgtgagataagataaacattatgtttacatatatcccacctgagtcattcaggcttaaaggttttctaaatactgtgtgcggcactagaaacttcatgctgtatcagtgaattatcacaaggacagaaaaccaaacaccacatgttctcactcataggtgggaattgaacaatgagaacacttggacaccggggcctgtcttggagttgggggctgggggagggatagcattaggagaaatacctaatgtaaatgacaagctcatgggtgcagcaaaccagcatggcacatgtatacctatgtatcaaacctgcacgttgtgcacatgtaccctagaacttaaagtataataataatttaaaaaaggaaataccaatattattagcctttaaccctaattcagaataaactaaatgttctaattgattttaaaaaaaaaaaggaaaaagaaaaagaaacttcatgctgtatcaagtcaatgtcagtattaagctactggactctatgaaatattatagatagacatttactgaaaaccaatataaaaatctggcccacaaagaccagaatggaaatatccaattttcttgatttaagatggtcaaaaccatcctggctaacacaatgaaaccctgtctctactaaaaatgcaaaaaattagccgggcatggtggcgggcacctgtagtcccagctactcgggaggctgaggcaggagaatggcatgaagccaggaggtggagcgtgcagtgagccaagatcacgccactgcactccagcctgggcaacagagtgagactctggctcaaaaaaaaaaagatggtcaaaagtgtgtgggtttttttttttttttttggaaaaaaaaaaagctctacacatgatttaagacaggtatgtgtaagaagcctttttgtgtgtgctggctttatcacgacaactctggctgattctttatgaaggattagggatactcatcttcagcagtgcacgtgagaagtaaactctgaaaaaggcaatttcttgggtttaggaaggactgtattctgggaattacttcagaggaatgggcaataattctaggattatacccaagaaggactggaagccttcaggagatgcttcagcttcttctagattttgaatgctcaataagccactgaaatgtgatatctatattatattacatatgtttatgtattagcatttcacccctctttggaaagggatagcattttaatatataatatactacaatttgtttgttatcttccaaccttttattttgaaagttttcaagcccatagaaaaggtggaagaattgtacaatgaaccccttatatatttcaccaagattcaccaattgttaacattttgccacatttgcttgattgattttttaatttttttctatcaatctagatacatgtgtatgtatgtgtgtgcgtgtatcctaattatttgcctgtgtatacacagaaagaaagaatgaaaaatatacataataataaattatatatatgttaggtgaatatataaatatatatatacttaagttgtgtgcactttactctgttttttatgtcataatttaaaattttaaaatatataagaaataaataagcctgaaacaaaggtattttcagcaaaataaaaatagagacacttcatcaacagctgattcccactgagacatatatttcagaaaggagagaactgatcacagatagaaggtatgggacgcaaaaagtaatgaagagaaaagaaagtggcaaatacacgttaaaatgtaaatgtacttggtataaatagtgctaatgatatctagtgggattatacaaagatacactaaaaattccctgcaaggttagttagtatgtaattcagggtgagtaggcaaattggtgaagctaagtaaatctaaggtcattttattattcaggaaaaaggcaaaggtttaaattgactttagactttgataaatgaattatgcgtgctggaatttctagcctatttcccaaacaaagattatcagagtggattaggaaggcaagatctggcctggtgtggtggctcacacctgtaatcccagcactttggggggccgaggtgggtggatcacctgaggtcaggagttgtctaccagcctggccaacatagtgaatataatgaaaccccatctctactaaaaatacaaaaattagcctggcgaggtggcacatctctgtaatcccaggtacttgggagcctgaggcaggcttgaacctgggaggcagaagttgcagtgagccaagaccatgacaagaacaaaactctgtctcaaaaaaaaaaaaaaaaaaaaaaaaaagaggcaaagacaaagacaagatccaataataaattatttatttaaaaacacatctaaaatggaaggaggttgggtgcggtgactcacgcctgtaatcccagcattttgggaggccaaggcaggtggatcactggaagtcaggagtttgagaccagcctgaccaacatggtgaaaccccgtctctagaaaaattagctgggcgtggtggcatgtgctgtaatcccagctattcgggagactgaggcaggagaactgcttgaacccaggaggcggaggttgcagtgagctgagatcgtgccagtgcaatccagcctgggggacccagcaagactccatctcaaaaaaatacgataaaataaaatggaaggatacacaattgttgactataaaaggatgggaaaagatatttcatgtaataagaaagccagcatataagaggcaggaggatcacttgaggccaggagtttgagaccagcccggacaacataaggagaccctgtctctacaaaaaaaaaaaaaaaaaaaagccagatgcctggctcacgcctgtaatcctagcactttgggaggcaccttgggactgttgaattaaaacaaaacacagcttaggctgctgtgggtattgacgacttgtgatttctgtgcagggcactgaatgtcaaagtgaaggaattcaatgaagcccggatcaagggcaggagcaaccgtgaccctcttaaaagagccaatgccccatgtaattagtgacgcgcgcgaatggatagacgctattcccaccgtccctacatagcatccagcgacaccacagccaagggacaggcttggcggaacctgcgggagagaagaaccctctgagcctgattgaaaggcggtgaagagacaggagagggggatcggtgggcggtcccgcctccatcttcagttcccgcatgggggcgaggcaggtacatgggccttgcgggctgtgggtgaaattccattattaattgttttttcactaacctggtgggggagtcgggcgcgagtttcgagagagactctggcttctggcgccaagccttagccaagctcaccaggggcagcgctagatggggagactgggacacacgtctgaacgcagatgtccgaagggagcgcaggaagacagaagcctcccgttgggcaggagggcaaaagctcctgggtcttggatttgcaacaggagttcagacggtgaaagcagggcctcaggatccttctgaccttttgagttttaaacaaggggtgtcagaaaagtcgtcacagggataactgatttgcagcaggaaagcattcataggaatgaggcttctttttgttttttgtctttgttttttgtttttttttttttttttgacagggtctcattctgtggcacaggctggagtgcagtggtgccaccattgctcactgcgctatgtgagctatgtgatcggcgcttaagtgatactctcgcctcagcctccaaaataaatgggaccgcaggcctgagccaccatgtcctgtggctttttaatccttttgatccttggatgtgggctcttcctatcattggaagacagaattcaccaaggttgggatgttcacccactcagaaaacctgagctggggctggggctgtggctcacgcctataatcccagcactttggtaggccaaggcgggcgaatcacctgaggttggaagttcgaggccagcctggccaacatggtgaaacccccatctctactgaaaatacaaaaattagccgggcgtggtggcgcatgcctgtaatcccagctactcgggaggctgaggcaggagaatcacttgaaccagggaggcagaggttgcagtgagctgagacggtgtcactgcactccagcctgggcaacaagagcgaaacttcgtcaaaaaaaaaaaaaaggaagaaagaagaaaaggaaagaaaagaaagccggagctgggattagaccatgtgagacaggttgatttcacgctagtgagcatgcgtggttgccatggtgctcttgcccagtaccacaggtccccaggttcagacgtttggtgcctgtgcttggatgagggaccactgggctaagctgccatccgtgggatgctgactaaaggcctccaagtcagaatatgcccaggcagaactatagggcagcgccatgaagcctcggctggcctgggatagccggtcgtcgccaacaggacgcagtgcagcagggttgaggccccatgcggagagctcattgtcttgggaaaccggcagtgggaagggtggccggcccctcgcccttcacgcaaggcccattcgtggggaacctggcgctaaaccatccctagaggagctgcttctgggtccgagttttctctgcagcagagtggctccctggatgggatctgttgaaagttagccctccacacaggcgtgtgtccgcttcgcagcgtgtgtgcagagccatcaatccttccttcctcaatcccgggggtctcccgcgtccccatacccccaccccggcctctggtatgggaaccagtgacgtctctcccgtgagcctgcccgagcccgcaatgccctcaggaggcgcccgccccgccctctgggctttccgagggctgcaaggaacatgcgcttccgggggtggagaggcggtgagggccgcccccgcagcgtcctgtttgggagccaggtcttctcctcgttctgcccgggctcgaccaggggctagatcggggttcggggagcgaacaaggcacgtcggagggtggcccggtggcccctattcgaggggtggctgtgggccaggaggtagcggtggcggcggcctcgcctgtggccatctgagccgtgggccggtaggcggggaggagaagagggtccggccggtcaccgcccttgcacgcctcctcctcttaaaaataaataaataaataaatggcgagttgggggtggacagggatgttttagtgctgtgcgtgcgttctggagccacaccaccctctagaaccagggccacaaccacccgtgacgcccaccgtgagaagtgccctctcccagaagggcctgcaccagagaccttggtctttgttctttttggagagatctgtgcagatcgaggtcactccagccctggattcagggagggctgcactatcagagaaagacagcttcagcgaggcctcacagtgagtcagaccagactcttcccatccccaagatccctggactatggggcatcatcctgggatccctaaggtcacatgggaaacttctcaagcaccgatgctgccatctgatactgtggcctgatcccacccctggacacctggaaattctcatgaacccgtggaggcctggtgctacctgaaactgtgacctcattctacttccaactcacaagttgaagcgtagatttacatgcagtcaaatcaataattagattaattggctgactaaaggaaaaacttcagacacgttaaatttaacacagtttaattgagtaatgaatgatgcattaatcaggtagcccccagacccagagtaggttcagagaaacttcagggtgttccgtccataaatggttggataacatctaccgcagaagaaagtgatgtagaagaaactaaggaaggcactgaaatagctggactgctaacagttgggtgcttgccttatttgaaccaggtttgaacagttagttgggtacctgtgattggctgagactcagctatttttactatagcaggttacagactgtttacacatcaagttaggttacagttcactatgtatggagaaaccattagaccaaacttaaagtagtagggaggcagctttagacctaacaatgttaacaggccaaacatttcaattaaggggtacagattggtcaaattgcataaaaaagcaatacccatatatactgtctacaagggaaatattttacatatagggaaaagcattattgaaagtgtgagtattgaaaaagatataccatgcaaacagtaagcacaagaaagttgaagtactagtaaaaaaaaaaaaagaaagaaagaaaatagaattcaaaacagaaggtaaaagagactgaagcaggagaattgcttgaacctgggaggcgaaggttgcagtgagccaagattgcaccattgcactccagctctgggtgacagagcaagactccatctctgtggaaaaaaaagaaaaggagaaacaaatgtgagtgtaagcaaggcgagtgtttcctctatgattagtaattagcagtcttcaaaaagacattctgtggcttggggtttaatagtaaaataattagctggcatggtgacatgttcctgtactcccacccaagaggctgaagtgggaggattgtttgagcccaggagtttgaggctgcagtgagctgtgattgcaccactgtactccagcctggacaagattgagagagatcctgtctcaaaaaaaaaataagtaaaactggtggtttaacctcaaggcttacaactcattgttttgtaaggtttgcagaagatctcaatcctttacaagtaggaaggaaaagcctgttggtttgagagggaactgggtgtgtgcataggcctgttggtaggagaactggagcactcaaaaagggagctgcacgatgcttatgccggcttcactgagggctgtgggcattggaggaatgggctttgaaggacaattaggagtttgtggggtaaacaaatgcatgggggaagcggattagggagaggtctcccatgcagagggaccagtgtgagcaaagccaaagaggctggaagagactagggatgtcctgggaatagatattagacagggaatgataagggtgaggcatgggggctggtctccaagaccagtgtgggaggttggaattttcccccaggaatacaggaagcatggaaaaaattctgaggatggaatacggagggcctgaggtatgtggtggctcactgttgtgtgtttctcatttctggatctaagagacattctttaatccagcaaatgtttacttacctacactgtaatcatatgctgagtacacagagatggatcagacacagctggaaggaaccagatacacacatgcccatgcacacatgcacactgacatgtacaccgagacacacacatcagacacacattcacacacagcacacagatacacacagacatacatatatacagacatgtgcacacacaaacatgcatgcactcacagtcacacatgaacacacatagccaattatactataaagtacaaaaaaaaaatttttttttgagacagggtcttgctctgtcaccagagcaaaagctggagtacagtggcgttatctcggctcactgcaactgcaacctccacctcctgggctccagcgatcctcccacctcagcctcccaaagtgttgggattacaggcatgagccatggcacccagcctagaatcttacttgaggtaaaatgagaatccactggaaggttttggtttttttgaaacagagtcttgctctgtcacccaggctgcagtgcagtagcacaatcttgactcactgcagcctccacctcccaggttcaaatgattctctcgctgcagcatccagagtagctgggattacaggggcgcaccaccacgcccagctaattttttcatttttagtggagacagggtttcaccatgttggccaggctggtctcgaactcctgatctcaggtgatccaccacctcggcctcccaaagtgctgggattacaggcctgagccaccgtgcctggcccattagaaagttttaaacaggagtaatgtggtgtggcttgcaattaagagatcgctctggtgccaggtgggaaatagccacatgggcaagggcagggcgtactgcaataatccagtgaccaatggtggtgtcacaagtgcttatataaaaagatgccttcactgtatattagccattgagcttttttcttttttacaaacgttccatggattcataaactatttgccaaccattgctctagactaacctcctcattttcttttttttcttttttttctttttttttgagaccaagaccaagttttgctcttgttgcccaggctggagtgcaatggtgcagtctcagctcactgcaacctccgcctcccaggttcaagtgattctcctgcctcagcctcccaagtagctgggattacaggcgcgtgccaccaggcctggctaatttttgtatttttagcagagacagggtttcaccgtgttggtgaaggtcaggctggtctcaaactcctgacctcaggtgaaccacccaccttggcctcccaaagtgctgggattatgggcttgagccactgcacccagcctaacctcttcattttctagatgaggacactgaagcttggagaggaacagaaattggctcaggctaaggaagatctgtcaatctctcttgcaccaaaaaggcaaagccacctttctcaaggggctgtgtattggggtgttcttgcactgctataaagaaatacctgagactagaagtaatttataagaaaagaggtttgattggctcaaggttctgcagctgtacaggaagcgtggtgccagcatctccttctggggaggcctcagagagcttttacttatggcaaaaggatgcaggccagagaaggggagcgagagagagtaagaaggggaggtgccacacacttaaacaaccagatctggcaaggactcactcatcattgcaaggacagcaccaagtcatgaaggatctgcccccataacccaaacaccttccaccaggtcgcatctccaacactgggaattacatttcaacatgagatttgggcgggggacaaatatccaaactatgtcacggagcaagaggaggtccctggagctgttgaagcagaaatggggtgaagaatagaggtggagggtgcttaggcttccaaggtctcttctaggtgtgagatggagggattctgcgaccaagtcacctggagagtgactcaacaaggtgactgctttcccaagcacgagccctcgggggacagacgggggctgaaaactggcacacattcttcctggatcctttgacatgtgatcattcaaagataacagttcaaagataacaaagggattgaagctttaccaatccctttcttattgtggcattttctctattaaaaataaatactcatttatactataacttacagaatcagtaccaattctgaaagtatacaaagcgttgccttactttaaggaaggagaccactactactcctgctgccctcctcccccgaccttgcctagttcacaagacaggaggaaagagagaaagcaaaaagttggaaagaaacagaagtaagataaatagccagtcaaccttggcaccaccacccagccctaggagttaaaaaaagtaataataataacagcaacccctgacctaaactacttgtgttatctgtaagttccagacattatatgaaaaagcattgcaaaactttctgttctgttacctgatgcatgtagcccccagtcacgtttcccacgcttgctcgatttatcacgaccctttcatgtggacccctcgaagttgtaagcctttaaaaaggccaagaattggccaggcgtggtggctcatgcctgtaatcccagcactttggggggcgggcggatcacgaggtcaggagatcgagaccatcctggctaacacagtgaaaccccatctctactaaaaatacaaaaaaattagccgggtgtggtggtgggtgactgtagtcccagctactcgggaggcggaggcaggagaatggcatgaagtcgggaggcagagcttgcagtgagccgagattgcaccactgcactccagcctgggcaacagagggagactccaaaaaaaaaaaaaaaggccaagaatttatttttcagggagctcggctcttaagacgcaagtctgctgaggctcccggccaaataaacctcttccttctttaatccagtatctgaggagttttgtctgcagctcatcctgctacaacttcatgtcacacctggaaagcttacataggccaggggtggtggctcacgtctgtaatcccagtactctgggaggccgaggtgggcagatcacctgaggttaggagttcaagaccagcctggtcaacacggcgaaaccccgtctctactaaaaatacaaaaattagccaggtgtggtggcaggtgcctgtaatcctagctgctcaggggagactgaggcatgagaatcgcttgaacctgggagagggaggttgcagtgagctgagatcacgtcactgcactccagcctgggggatagagagaggctctgtctccaaaaaaaaaatacaaaaaattagccaggcatggtagcttatgcctgtaatcccagctacctgggaggctgtggtaggagaatcacttgaacccaggaggaggaggttgcagggagccaagattgtgccattgcactccagcctgggcaaaaagagcaaaagtctgtcaaaaagggaagggaaggggaggggaagggaggggaggggagggaagggaaggttacatagatgtgaaagtgaactgccagccatgagcaacaaatccgagtgacatgtcttcttcatggtcctgacacggacgcgtgggttcgatctgacagcagcctgtgccatcatagctactgctcatgcatgcattcggggtgcccaaagtgatgctgaggggggcattcctagattcaaccctccaggagaccatgaggaggctggtgcgatagcgcaatcagatgaagacgcctgggctgcacaggggccactgcaagtgaagactcaagaggccaagctgactcccagaggctagggccactaaggtgggtgccgaggcaggggccaggctgggaacatgagaggccatttgggtagggagataagttccgtgagtgagggccaagggtctgacctcctagtgtggctggagaagcagagacaacagagtgcaaaaagagaaatgggccaggcgaggccatctggcaacgcactgcccaccctccattgcgtgcctctggctgcaaaaacaggcaggatcttccggccggtttgcccgccactcaccttccgagcatgcgcaccctccgagattgccaggaattgacttctctgtggccaatgaggtgccgcgttcctccaggctcatccaatgaacttatccgatgcttttgcatccaccaatggggtttcgagtgctgtgtggccaggctggcccggccttgcgtcgtaagagaatgccaagcccggggagaaggcgttccgggcctcaactttggcgtcgtgagattcttgtgaggcgtctgcctggaagccggcagcaattttgcttctttaaagagaaaaagaaggctagggactcagattcctggattctgaggaaagagaaggctggggacccagatcctggctctgaggggaacgagggttgggggcctgggctcccgggcctgagagggaggggaccagaatggtgtgtcccgcaggaaaaggtggttggaacccagactcctcgatccctacataggacggggctgggctctcagaatcccgggttctgatgaggctggggctggggctgggggccgagattctgggtccctgagagaatgtaagggacccctgagactgagggagaagcggccttcagggccacactcctgatcctgaagttggagggcactgggtggccgggcctgagaattaaaaccatgaaaaactggggcgtgataaacctgtgaactcgctccagctcacaagccggttagggacagaacgactttagaagtcgtggtcatatacaccataaaccccactgtgaggccgggcatcagggctcactcctggaatcccagcactatggggggacgaggcgggcagatcacctgagatcaggagttcgagaccagcctgaccaacatggtgaaacgtcatctctactaaaaatacaaaaaattcactgggtgtggtggcgggcacctgtaatcccggctactcgggaggctgaggcaggagaattgcttgaacctgataggcagaggcagtgagccgagattgcgccactgcactccagcctgggcgacagtgcaagactccgtctcaaaaaaaaaaaaaatgcagattaaaacaccccaccctgaagtcagtacttgccaggacctagatttgatctcatgcactctggctgaaaagttaattgccttctctccatcaaattcacagatccagaccagctcctcccagacctctccagaagaagccatgggaacccctcgtatccagcatttgctgatcctcctggtcctaggagcctccctcctgacctgtgcgtatgggggacataggggagagccgtgtgtcacagaaggtggactgatgatgaaaagggagccgccttggcccatggagaagtgcttatccttttcttgttttctcctcagcgggcctagagctgtattgtcaaaagggtctgtccatgactgtggaagcagatccagccaatatgtttaactggaccacagaggaagtggagacttgtgacaaaggggcactttgccaggaaaccatactaataattaaagcaggtgaaatgagatggggcatttgggctgggtaggagggaggttgattatctccatgccaatgcttgttcccttcgtccaggccaattgtgacggccaccatccatttcccctccttcctgtctcataacagggactgagacagccattttggccacgaagggctgcatcccggaaggggaggaggccataacaattgtccagcactcttcacctcccggcctgatcgtgacctcctacagtaactactgtgaggattccttctgtaatgacaaagacagcctgtctcagttttgggagttcagtgagaccacaggtaccctggaagtgggggagataggtactaagagaaactccataaagagcttgtgtatggcctccctttgcattctgacttggcttagcctaagtggtccataccccaaagtacctcacagttcaagtaattttatgtttctgaattgttcattgggatctaaacactgctcagagcagcgagataccagtgaagcctggagtgtaaactgggttttgtgtttattaagcaataagacaggctgggtgaggtggatcgcctgaggtcaggggtttgggaccagcttggccaacatggtgaaaacctgtctctactaaaaatacaaaaattagcttagcctggtggcgcacacctgtaatcccagatactcgggaagctgaggcaggagaattgcttgaacccaggaggcagaggttgcagtgagccaatatcacaccactgcacttcagcctgggacagagagcaagactccatcaaaaaaaaaaaaaaaaaaagcaataagacatcagtgtaggtttccgaacagggtggtattatcagtctaacaagtattggtttcccactgctgcacgagaacggcccagttccccaatttacaaggcctgtagtaacttggcccttcctgtcttttcagcttcatttccctctcttccctctctcatttactgtgtgctaactggggctaatactcaaaatgcttaacaatgtagatggcactggccaatcaaaatggattctggccataaaaaacaaaaacaaaaacaaaaaaaacagatcaaagaaacagctgggcctacaagctgaatatgagtcgtgcaacttctcacaattccctgaatccaccaagctggctcacaccacctgacctttgtccttgctgtttcctttactaccctccccaccccattttcacatagctaacccctgttcatcctccatgtcaattcaggtatcagctctttgaaaatatttgccaaattcttttaggtagttgggtattcctccattcctttgtcattataccttgaacacagcagctactgaattgattacttacatgtctttctcctaggcagagatgccaggtgacaggaactatgtccttttcatctctgtatcttcacacctcagcagagtttggaagtcagatcgatggagatttcacagcagagaacaccagctggggaaggatggggaggctgaagtaatgggccttgattagagtggcatctgcaggaaaatcttggggaagagaaggcagcaaggagcaacatctctggaggcaggacctgcccttaactgtctctctcatttccctccagcttccactgtgtcaacaaccctccattgtccaacctgtgtggctttggggacctgtttcagtgctccttctcttccctgtcccaatggtacaactcgatgctatcaaggaaaacttgagatcactggaggtaaactgaaatgaacatctgatagtttcagaggctggaaaaccatttgagtggctccccagagattctgacactgagctctccagggatgaggggggactggattctcctctgatgtcctaaaacatctctgtctctcccgatccttccttgttctataggtggcattgagtcgtctgtggaggtcaaaggctgtacagccatgattggctgcaggctgatgtctggaatcttagcagtaggacccatgtttgtgagggaagcgtgcccacatcagctgctcactcaacctcgaaagactgaaaatggggccacctgtcttcccattcctgtttgggggttacagctactgctgccattgctgctgccatcatttattcacttttcctaagaaggcacttctgggcctgggtctgaggacatcttttttgactgggagccttcttactgttgaggttcaacaagctgaggagtagatgggaatttgagggagaatacagagatactatgaacgtatttgacatttttaatacaatttctgctataatttttgtatgcagtaggcgttactaataaacatttctgctgtgatttgtgtatgtttcaacactagaagtggaattttagtgctgaaagagcctttaaaattcatcttctccaaaccacacattctccagaaagagaatctgagatctggaaaatttcagtgagtttcttacatttagctatggccagagccaaggcaagaacttacatattttgacgtaaagtctgattttcctttcactctaatatgctagctctccttgctagcagaagtaactagcattagcctcctccagaacactcccagcccaatcttaaggctgctgttttggggttctaaaatttccctaggaagtatggccaaatgagaaaaatcagactccaaattctccagttatgggcctgctgtagtggcttatacctgtaatcccagcactttgagaggcagaggtgggaggattgcatgagccaaggagtttgagaccagcctgggcaacctaatgagactacatctctacaaaaaaaaataatccaaaaattagcctggcatggtggcgctcgcctgtagtcccagctacttgggaggctgaagtgggatgatcacttatgtccacaaaaagagtcaaactctgtaaaatatttgaaaagatttattctgaaccaaatgtgagtgaccgtggtgtgtgacacagccctcaggagaccctgaaaacgtgcctaaggtggtcggggcacagcctagttttataccgtttaggaagacatgaggcaatcaaatacatgtaagatgtacattgtttcagtccagaaaggcaggacaactccaagtggaggaaacttccaggttataggtagattcaaaaattttctgattggccattggttaaaagagttattatctaaagacctggaatcagtagaaaggaatgtctgggttacgatgataagggattgtggaaaccaaagttttattacacaaatgaagccaccatgtcgcaggcttcagagagaatacattgtaaatgtttatcagacttaaggtctgtgttgatgttcatgctggtcagcttttcccaaaatccaaaagggaggcgggtatattgaggcatggccgactctcccttcccacagcatggcctgaaccagtttttcaggttaactttggaaagccctggctgagaggaggggacccttcagatggttgggggcggggagtggcttataattttattttttgtctgcacttgagctcaggaggttgaggctgcagtgagccatgatcatgcctctgtacttcagactggatgacagagtgagatcctctatcaaaacaaaaggcaaattctctcattacagtgggccccatttctctgtgtcctgtctatcccttgcctgctctacatcattccttcccttccctggggctgacttaatgactcttcagtggacttgggagggagggaggaaggattcattacagtatggtgaatggggacctgtgactacttgggcggcaaagatttttggaaaattctcatgcttattattactcaaaaatacataagctctatcttattgtaaaagactcaaatgatatcagaggtgtatagagcaaagtaaaaggtggggagggtaaaagggagacagatattttcttctaaaaaaaaaaaaaaaaacagctttactaagacttatctgacacacagtaaacggcaccagaggtggaaggagagacttttattacaaacacttgttcccctctcaaaagactggggagtttggccatagtatatatattccaaccaagttctttctagaaagttctctggttctacccactgagaaagggaaaaaaaaaatcttgggataccaaactcactatgctaaagggaaaagtcaggcttggga
